(19) United States
(12) Patent Application Publication
(10) Pub. No.: US 2008/0026396 A1
(43) Pub. Date: Jan. 31, 2008

(54) METHOD AND NUCLEIC ACIDS FOR THE ANALYSIS OF ASTROCYTOMAS

(75) Inventors: Alexander Olek, Berlin (DE); Christian Piepenbrock, Berlin (DE); Kurt Berlin, Stahnsdorf (DE)

Correspondence Address: DAVIS WRIGHT TREMAINE, LLP/Seattle, 1201 Third Avenue, Suite 2200, SEATTLE, WA, 98101-3045, US

(73) Assignee: EPIGENOMICS AG, Berlin (DE)

(21) Appl. No.: 11/835,336

(22) Filed: Aug. 7, 2007

Related U.S. Application Data
(63) Continuation of application No. 10/311,507, filed on Dec. 16, 2002, now abandoned.

(30) Foreign Application Priority Data
Jun. 30, 2000 (DE) 10032529.7
Sep. 1, 2000 (DE) 10043826.1

(51) Int. Cl. C12Q 1/68; C07H 21/04; C12P 19/34

(52) U.S. Cl. 435/6; 435/91.2; 536/24.3

(57) ABSTRACT

Chemically modified genomic sequences, oligonucleotides and/or PNA-oligomers for detecting the cytosine methylation state of genomic DNA. In addition, a method for ascertaining genetic and/or epigenetic parameters of genes for use in the characterization, classificaiton, differrentiation, grading, staging, treatment and/or diagnosis of astrocytomas, or the predisposition to astrocytomas.

### CROSS REFERENCE TO RELATED APPLICATIONS

[0001] This application is a continuation of Ser. No. 10/311,507 filed Dec. 16, 2002, which is a U.S. nationalization of PCT/EP2001/07538 filed Jul. 2, 2001, claims the benefit of priority to DE 10032529.7 filed Jun. 30, 2000, and DE 10043826.1 filed Sep. 1, 2000, all of which are incorporated by reference herein in their entireties.

### FIELD OF THE INVENTION

[0002] The levels of observation that have been studied by the methodological developments of recent years in molecular biology, are the genes themselves, the translation of these genes into RNA, and the resulting proteins. The question of which gene is switched on at which point in the course of the development of an individual, and how the activation and inhibition of specific genes in specific cells and tissues are controlled is correlatable to the degree and character of the methylation of the genes or of the genome. In this respect, pathogenic conditions may manifest themselves in a changed methylation pattern of individual genes or of the genome.

[0003] The present invention relates to nucleic acids, oligonucleotides, PNA-oligomers, and to a method for the characterisation, classification, differentiation, grading, staging, treatment and/or diagnosis of astrocytomas, or the predisposition to astrocytomas, by analysis of the genetic and/or epigenetic parameters of genomic DNA and, in particular, with the cytosine methylation status thereof.

### SEQUENCE LISTING

[0004] A Sequence Listing in paper form (233 pages) and comprising SEQ ID NOS:1-264 is attached to, and forms a part of, this application and is incorporated by reference herein in its entirety.

### BACKGROUND OF THE INVENTION

[0005] It is projected that 17,200 adults will develop brain tumors within the United States in 2001. Of the various classes of tumors, gliomas are the most common, of which astrocytomas are one of the most common. These may be graded according to the WHO classification into four categories, pilocytic astrocytomas, low-grade nonpilocytic astrocytomas, anaplastic gliomas, and glioblastomas multiforme. Pilocytic astrocytomas (WHO Grade I) are the most benign, and are usually found in childhood cases. They occasionally form cysts, or are enclosed within cysts, and are slow growing and generally non invasive. Treatment in the first instance is by surgery, which in some cases may be followed by radiation therapy. The effectiveness of chemotherapy and other forms of treatment are currently being evaluated.

[0006] Grade II astrocytomas include fibrillary, gemistocytic and protoplasmic astrocytomas. As opposed to Grade I tumors they are infiltrative. Treatment, is ideally by complete surgical removal, where possible. In some cases surgery may be supplemented by radiation therapy.

[0007] A basic property of astrocytic gliomas is an ability to undergo anaplastic change. This is related to the development of serial genetic defects, accounting for the orderly progression of features of malignancy, i.e. hypercellularity, anaplasia. It is important to make the distinction between between Grade I pilocytic astrocytomas and diffusely infiltrating Grade II tumors because, it is only the latter group that has a propensity to developing into the malignant Grade III (e.g. anaplastic astrocytoma) and ultimately Grade IV (e.g. glioblastome multiforme) tumors.

[0008] Unlike breast and most other forms of cancer, there are no established guidlines for astrocytoma staging. Diagnosis is most often by scan imaging methods (e.g. MRI, CT) which may be followed by biopsy for histological and cytological analysis. The distinction between Grade I and Grade II astrocytomas may not always be clear using such methods.

[0009] Diagnosis by such methodologies does not utilise the molecular basis of the progression to malignancy. Furthermore, molecular markers offer the advantage that even samples of very small sizes and samples whose tissue architecture has not been maintained can be analyzed quite efficiently. Within the last decade numerous genes have been shown to be differentially expressed between benign and malignant tumors. However, no single marker has been shown to be sufficient for the distinction between the two tumors. High-dimensional mRNA based approaches have recently been shown to be able to provide a better means to distinguish between different tumor types and benign and malignant lesions. Application as a routine diagnostic tool in a clinical environment is however impeded by the extreme instability of mRNA, the rapidly occuring expression changes following certain triggers (e.g. sample collection), and, most importantly, the large amount of mRNA needed for analysis (Lipshutz, R. J. et al., Nature Genetics 21:20-24, 1999; Bowtell, D. D. L. Nature genetics suppl. 21:25-32, 1999), which often cannot be obtained from a routine biopsy.

[0010] Aberrant DNA methylation within CpG islands is common in human malignancies leading to abrogation or overexpression of a broad spectrum of genes (Jones, P.A. Cancer Res 65:2463-2467, 1996). Abnormal methylation has also been shown to occur in CpG rich regulatory elements in intronic and coding parts of genes for certain tumours (Chan, M. F., et al., Curr Top Microbiol Immunol 249:75-86,2000). Highly characteristic DNA methylation patterns could also be shown for breast cancer cell lines (Huang, T. H.-M., et al., Hum Mol Genet 8:459-470, 1999).

[0011] Abnormal methylation of genes has been linked to the incidence of gliomas (e.g. Epigenetic silencing of PEG3 gene expression in human glioma cell lines. Maegawa et al. Mol Carcinog. 2001 May;31(1):1-9.). It has also been shown that methylation pattern analysis can be correlated with the development of low grade astrocytomas (Aberrant methylation of genes in low-grade astrocytomas. Costello J F, Plass C, Cavenee W K. Brain Tumor Pathol. 2000;17(2):49-56). However, the techniques used in such studies (restriction landmark genomic scanning, imprinting analysis) are limited to research, they are unsuitable for use in a clinical or diagnostic setting, and do not provide the basis for the development of a medium or high throughput method for the analysis of gliomas.

[0012] 5-methylcytosine is the most frequent covalent base modification in the DNA of eukaryotic cells. It plays a role, for example, in the regulation of the transcription, in genetic imprinting, and in tumorigenesis. Therefore, the identification of 5-methylcytosine as a component of genetic information is of considerable interest. However, 5-methylcytosine positions cannot be identified by sequencing since 5-methylcytosine has the same base pairing behavior as cytosine. Moreover, the epigenetic information carried by 5-methylcytosine is completely lost during PCR amplification.

[0013] A relatively new and currently the most frequently used method for analyzing DNA for 5-methylcytosine is based upon the specific reaction of bisulfite with cytosine which, upon subsequent alkaline hydrolysis, is converted to uracil which corresponds to thymidine in its base pairing behavior. However, 5-methylcytosine remains unmodified under these conditions. Consequently, the original DNA is converted in such a manner that methylcytosine, which originally could not be distinguished from cytosine by its hybridization behavior, can now be detected as the only remaining cytosine using “normal” molecular biological techniques, for example, by amplification and hybridization or sequencing. All of these techniques are based on base pairing which can now be fully exploited. In terms of sensitivity, the prior art is defined by a method which encloses the DNA to be analyzed in an agarose matrix, thus preventing the diffusion and renaturation of the DNA (bisulfite only reacts with single-stranded DNA), and which replaces all precipitation and purification steps with fast dialysis (Olek A, Oswald J, Walter J. A modified and improved method for bisulphite based cytosine methylation analysis. Nucleic Acids Res. 1996 Dec 15;24(24):5064-6). Using this method, it is possible to analyze individual cells, which illustrates the potential of the method. However, currently only individual regions of a length of up to approximately 3000 base pairs are analyzed, a global analysis of cells for thousands of possible methylation events is not possible. However, this method cannot reliably analyze very small fragments from small sample quantities either. These are lost through the matrix in spite of the diffusion protection.

[0014] An overview of the further known methods of detecting 5-methylcytosine may be gathered from the following review article: Rein, T., DePamphilis, M. L., Zorbas, H., Nucleic Acids Res. 1998, 26, 2255.

[0015] To date, barring few exceptions (e.g., Zeschnigk M, Lich C, Buiting K, Doerfler W, Horsthemke B. A single-tube PCR test for the diagnosis of Angelman and Prader-Willi syndrome based on allelic methylation differences at the SNRPN locus. Eur J Hum Genet. 1997 Mar-Apr;5(2):94-8), the bisulfite technique is only used in research. Always, however, short, specific fragments of a known gene are amplified subsequent to a bisulfite treatment and either completely sequenced (Olek A, Walter J. The pre-implantation ontogeny of the H19 methylation imprint. Nat Genet. 1997 Nov;17(3):275-6) or individual cytosine positions are detected by a primer extension reaction (Gonzalgo M L, Jones P A. Rapid quantitation of methylation differences at specific sites using methylation-sensitive single nucleotide primer extension (Ms-SNuPE). Nucleic Acids Res. 1997 Jun 15;25(12):2529-31, WO 95/00669) or by enzymatic digestion (Xiong Z, Laird P W. COBRA: a sensitive and quantitative DNA methylation assay. Nucleic Acids Res. 1997 Jun 15;25(12):2532-4). In addition, detection by hybridization has also been described (Olek et al., WO 99/28498).

[0016] Further publications dealing with the use of the bisulfite technique for methylation detection in individual genes are: Grigg G, Clark S. Sequencing 5-methylcytosine residues in genomic DNA. Bioessays. 1994 Jun;16(6):431-6, 431; Zeschnigk M, Schmitz B, Dittrich B, Buiting K, Horsthemke B, Doerfler W. Imprinted segments in the human genome: different DNA methylation patterns in the Prader-Willi/Angelman syndrome region as determined by the genomic sequencing method. Hum Mol Genet. 1997 Mar;6(3):387-95; Feil R, Charlton J, Bird A P, Walter J, Reik W. Methylation analysis on individual chromosomes: improved protocol for bisulphite genomic sequencing. Nucleic Acids Res. 1994 Feb 25;22(4):695-6; Martin V, Ribieras S, Song-Wang X, Rio M C, Dante R. Genomic sequencing indicates a correlation between DNA hypomethylation in the 5′ region of the pS2 gene and its expression in human breast cancer cell lines. Gene. 1995 May 19;157(1-2):261-4; WO 97/46705, WO 95/15373 and WO 97/45560.

[0017] An overview of the Prior Art in oligomer array manufacturing can be gathered from a special edition of Nature Genetics (Nature Genetics Supplement, Volume 21, January 1999), published in January 1999, and from the literature cited therein.

[0018] Fluorescently labeled probes are often used for the scanning of immobilized DNA arrays. The simple attachment of Cy3 and Cy5 dyes to the 5′—OH of the specific probe are particularly suitable for fluorescence labels. The detection of the fluorescence of the hybridized probes may be carried out, for example via a confocal microscope. Cy3 and Cy5 dyes, besides many others, are commercially available.

[0019] Matrix Assisted Laser Desorption Ionization Mass Spectrometry (MALDI-TOF) is a very efficient development for the analysis of biomolecules (Karas M, Hillenkamp F. Laser desorption ionization of proteins with molecular masses exceeding 10,000 daltons. Anal Chem. 1988 Oct 15;60(20):2299-301). An analyte is embedded in a light-absorbing matrix. The matrix is evaporated by a short laser pulse thus transporting the analyte molecule into the vapor phase in an unfragmented manner. The analyte is ionized by collisions with matrix molecules. An applied voltage accelerates the ions into a field-free flight tube. Due to their different masses, the ions are accelerated at different rates. Smaller ions reach the detector sooner than bigger ones.

[0020] MALDI-TOF spectrometry is excellently suited to the analysis of peptides and proteins. The analysis of nucleic acids is somewhat more difficult (Gut I G, Beck S. DNA and Matrix Assisted Laser Desorption Ionization Mass Spectrometry. Current Innovations and Future Trends. 1995, 1; 147-57). The sensitivity to nucleic acids is approximately 100 times worse than to peptides and decreases disproportionally with increasing fragment size. For nucleic acids having a multiply negatively charged backbone, the ionization process via the matrix is considerably less efficient. In MALDI-TOF spectrometry, the selection of the matrix plays an eminently important role. For the desorption of peptides, several very efficient matrixes have been found which produce a very fine crystallization. There are now several responsive matrixes for DNA, however, the difference in sensitivity has not been reduced. The difference in sensitivity can be reduced by chemically modifying the DNA in such a manner that it becomes more similar to a peptide. Phosphorothioate nucleic acids in which the usual phosphates of the backbone are substituted with thiophosphates can be converted into a charge-neutral DNA using simple alkylation chemistry (Gut I G, Beck S. A procedure for selective DNA alkylation and detection by mass spectrometry. Nucleic Acids Res. 1995 Apr 25;23(8):1367-73). The coupling of a charge tag to this modified DNA results in an increase in sensitivity to the same level as that found for peptides. A further advantage of charge tagging is the increased stability of the analysis against impurities which make the detection of unmodified substrates considerably more difficult.

[0021] Genomic DNA is obtained from DNA of cell, tissue or other test samples using standard methods. This standard methodology is found in references such as Fritsch and Maniatis eds., Molecular Cloning: A Laboratory Manual, 1989.

### SUMMARY OF THE INVENTION

[0022] The disclosed invention provides a method and nucleic acids for the staging of astrocytomas. It discloses a means of distinguishing between healthy tissue, pilocytic astrocytoma (Grade I) and Grade II astrocytoma cells. This provides a means for the improved staging and grading of brain tumors, at a molecular level, as opposed to currently used methods of a relatively subjective nature such as histological analysis and scan imaging. This is of particular importance due to the different prognosis and treatment of Grade I and II astrocytoma patients. The disclosed invention provides the means for the development of a standardised method of astrocytoma staging, which currently does not exist. Furthermore, the disclosed invention presents improvements over the state of the art in that current methods of histological and cytological analysis require that the biopsy contain a sufficient amount of tissue. The method according to the present invention can be used for classification of minute samples.

[0023] The invention provides the chemically modified genomic DNA, as well as oligonucleotides and/or PNA-oligomers for detecting cytosine methylations, as well as a method which is particularly suitable for the characterisation, classification, differentiation, grading, staging, treatment and/or diagnosis of astrocytomas. The present invention is based on the discovery that genetic and epigenetic parameters and, in particular, the cytosine methylation patterns of genomic DNA are particularly suitable for characterisation, classification, differentiation, grading, staging, treatment and/or diagnosis of astrocytomas.

[0024] This objective is achieved according to the present invention using a nucleic acid containing a sequence of at least 18 bases in length of the chemically pretreated genomic DNA according to one of Seq. ID No. 1 through Seq. ID No.120.

[0025] The chemically modified nucleic acid could heretofore not be connected with the ascertainment of disease relevant genetic and epigenetic parameters.

[0026] The object of the present invention is further achieved by an oligonucleotide or oligomer for the analysis of chemically pretreated DNA, for detecting the genomic cytosine methylation state, said oligonucleotide containing at least one base sequence having a length of at least 13 nucleotides which hybridizes to a chemically pretreated genomic DNA according to Seq. ID No.1 through Seq. ID No.120. The oligomer probes according to the present invention constitute important and effective tools which, for the first time, make it possible to ascertain specific genetic and epigenetic parameters of brain tumors, in particular, for use in characterisation, classification, differentiation, grading, staging, treatment and/or diagnosis of astrocytomas. The base sequence of the oligomers preferably contains at least one CpG dinucleotide. The probes may also exist in the form of a PNA (peptide nucleic acid) which has particularly preferred pairing properties. Particularly preferred are oligonucleotides according to the present invention in which the cytosine of the CpG dinucleotide is the 5^{th}-9^{th} nucleotide from the 5′-end of the 13-mer; in the case of PNA-oligomers, it is preferred for the cytosine of the CpG dinucleotide to be the 4^{th}-6^{th} nucleotide from the 5′-end of the 9-mer.

[0027] The oligomers according to the present invention are normally used in so called “sets” which contain at least one oligomer for each of the CpG dinucleotides of the sequences of Seq. ID No.1 through Seq. ID No.120. Preferred is a set which contains at least one oligomer for each of the CpG dinucleotides from one of Seq. ID No.1 through Seq. ID No.120.

[0028] Moreover, the present invention makes available a set of at least two oligonucleotides which can be used as so-called “primer oligonucleotides” for amplifying DNA sequences of one of Seq. ID No.1 through Seq. ID No.120, or segments thereof.

[0029] In the case of the sets of oligonucleotides according to the present invention, it is preferred that at least one oligonucleotide is bound to a solid phase. It is further preferred that all the oligonucleotides of one set are bound to a solid phase.

[0030] The present invention moreover relates to a set of at least 10 n (oligonucleotides and/or PNA-oligomers) used for detecting the cytosine methylation state in chemically pretreated genomic DNA (Seq. ID No.1 through Seq. ID No.120). These probes enable characterisation, classification, differentiation, grading, staging and/or diagnosis of genetic and epigenetic parameters of brain tumors, more specifically astrocytomas. Furthermore, the probes enable the diagnosis of predisposition to astrocytomas. The set of oligomers may also be used for detecting single nucleotide polymorphisms (SNPs) in chemically pretreated genomic DNA according to one of Seq. ID No.1 through Seq. ID No.120.

[0031] According to the present invention, it is preferred that an arrangement of different oligonucleotides and/or PNA-oligomers (a so-called “array”) made available by the present invention is present in a manner that it is likewise bound to a solid phase. This array of different oligonucleotide- and/or PNA-oligomer sequences can be characterized in that it is arranged on the solid phase in the form of a rectangular or hexagonal lattice. The solid phase surface is preferably composed of silicon, glass, polystyrene, aluminum, steel, iron, copper, nickel, silver, or gold. However, nitrocellulose as well as plastics such as nylon which can exist in the form of pellets or also as resin matrices are possible as well.

[0032] Therefore, a further subject matter of the present invention is a method for manufacturing an array fixed to a carrier material for the grading, staging, treatment and/or diagnosis of astrocytomas, in which method at least one oligomer according to the present invention is coupled to a solid phase. Methods for manufacturing such arrays are known, for example, from U.S. Pat. No. 5,744,305 by means of solid-phase chemistry and photolabile protecting groups.

[0033] A further subject matter of the present invention relates to a DNA chip for the characterisation, classification, differentiation, grading, staging, treatment and/or diagnosis of astrocytomas. Furthermore the DNA chip enables the diagnosis of predisposition to astrocytomas. The DNA chip contains at least one nucleic acid according to the present invention. DNA chips are known, for example, for U.S. Pat. No. 5,837,832.

[0034] Moreover, a subject matter of the present invention is a kit which may be composed, for example, of a bisulfite-containing reagent, a set of primer oligonucleotides containing at least two oligonucleotides whose sequences in each case correspond or are complementary to a 18 base long segment of the base sequences specified in the appendix (Seq. ID No.1 through Seq. ID No.120), oligonucleotides and/or PNA-oligomers as well as instructions for carrying out and evaluating the described method. However, a kit along the lines of the present invention can also contain only part of the aforementioned components.

[0035] The present invention also makes available a method for ascertaining genetic and/or epigenetic parameters of genomic DNA. The method is for use in the grading, staging, treatment and/or diagnosis of astrocytomas, in particular for the differentiation of Grade I and Grade II tumors. The method enables the analysis of cytosine methylations and single nucleotide polymorphisms, including the following steps:

[0036] In the first step of the method the genomic DNA sample must be isolated from tissue or cellular sources. Such sources may include cell lines, histological slides, body fluids, for example cerebrospinal fluid or lymphatic fluid, or tissue embedded in paraffin; for example, brain, central nervous system or lymphatic tissue. Extraction may be by means that are standard to one skilled in the art, these include the use of detergent lysates, sonification and vortexing with glass beads. Once the nucleic acids have been extracted the genomic double stranded DNA is used in the analysis.

[0037] In a preferred embodiment the DNA may be cleaved prior to the chemical treatment, this may be any means standard in the state of the art, in particular with restriction endonucleases.

[0038] In the second step of the method, the genomic DNA sample is chemically treated in such a manner that cytosine bases which are unmethylated at the 5′-position are converted to uracil, thymine, or another base which is dissimilar to cytosine in terms of hybridization behavior. This will be understood as ‘chemical pretreatment’ hereinafter.

[0039] The above described treatment of genomic DNA is preferably carried out with bisulfite (sulfite, disulfite) and subsequent alkaline hydrolysis which results in a conversion of non-methylated cytosine nucleobases to uracil or to another base which is dissimilar to cytosine in terms of base pairing behavior.

[0040] Fragments of the chemically pretreated DNA are amplified, using sets of primer oligonucleotides according to the present invention, and a, preferably heat-stable polymerase. Because of statistical and practical considerations, preferably more than ten different fragments having a length of 100-2000 base pairs are amplified. The amplification of several DNA segments can be carried out simultaneously in one and the same reaction vessel. Usually, the amplification is carried out by means of a polymerase chain reaction (PCR).

[0041] In a preferred embodiment of the method, the set of primer oligonucleotides includes at least two oligonucleotides whose sequences are each reverse complementary or identical to an at least 18 base-pair long segment of the base sequences specified in the appendix (Seq. ID No.1 through Seq. ID No.120). The primer oligonucleotides are preferably characterized in that they do not contain any CpG dinucleotides. In a particularly preferred embodiment of the method, the sequence of said primer oligonucleotides are designed so as to selectively anneal to and amplify, only the astrocytoma and/or brain tissue specific DNA of interest, thereby minimizing the amplification of background or non relevant DNA. In the context of the present invention, background DNA is taken to mean genomic DNA which does not have a relevant tissue specific methylation pattern, in this case the relevant tissue being brain tissue, more specifically astrocyte or astrocytoma tissue. Examples of such primers used in the examples are contained in Table 1.

[0042] According to the present invention, it is preferred that at least one primer oligonucleotide is bound to a solid phase during amplification. The different oligonucleotide and/or PNA-oligomer sequences can be arranged on a plane solid phase in the form of a rectangular or hexagonal lattice, the solid phase surface preferably being composed of silicon, glass, polystyrene, aluminum, steel, iron, copper, nickel, silver, or gold, it being possible for other materials such as nitrocellulose or plastics to be used as well.

[0043] The fragments obtained by means of the amplification can carry a directly or indirectly detectable label. Preferred are labels in the form of fluorescence labels, radionuclides, or detachable molecule fragments having a typical mass which can be detected in a mass spectrometer, it being preferred that the fragments that are produced have a single positive or negative net charge for better detectability in the mass spectrometer. The detection may be carried out and visualized by means of matrix assisted laser desorption/ionization mass spectrometry (MALDI) or using electron spray mass spectrometry (ESI).

[0044] The amplificates obtained in the second step of the method are subsequently hybridized to an array or a set of oligonucleotides and/or PNA probes. In this context, the hybridization takes place in the manner described in the following. The set of probes used during the hybridization is preferably composed of at least 10 oligonucleotides or PNA-oligomers. In the process, the amplificates serve as probes which hybridize to oligonucleotides previously bonded to a solid phase. The non-hybridized fragments are subsequently removed. Said oligonucleotides contain at least one base sequence having a length of 13 nucleotides which is reverse complementary or identical to a segment of the base sequences specified in the appendix, the segment containing at least one CpG dinucleotide. The cytosine of the CpG dinucleotide is the 5^{th} to 9^{th} nucleotide from the 5′-end of the 13-mer. One oligonucleotide exists for each CpG dinucleotide. Said PNA-oligomers contain at least one base sequence having a length of 9 nucleotides which is reverse complementary or identical to a segment of the base sequences specified in the appendix, the segment containing at least one CpG dinucleotide. The cytosine of the CpG dinucleotide is the 4^{th} to 6^{th} nucleotide seen from the 5′-end of the 9-mer. Preferably one oligonucleotide exists for each CpG dinucleotide.

[0045] In the fifth step of the method, the non-hybridized amplificates are removed.

[0046] In the final step of the method, the hybridized amplificates are detected. In this context, it is preferred that labels attached to the amplificates are identifiable at each position of the solid phase at which an oligonucleotide sequence is located.

[0047] According to the present invention, it is preferred that the labels of the amplificates are fluorescence labels, radionuclides, or detachable molecule fragments having a typical mass which can be detected in a mass spectrometer. The mass spectrometer is preferred for the detection of the amplificates, fragments of the amplificates or of probes which are complementary to the amplificates, it being possible for the detection to be carried out and visualized by means of matrix assisted laser desorption/ionization mass spectrometry (MALDI) or using electron spray mass spectrometry (ESI). The produced fragments may have a single positive or negative net charge for better detectability in the mass spectrometer.

[0048] The aforementioned method is preferably used for ascertaining genetic and/or epigenetic parameters of genomic DNA.

[0049] The oligomers according to the present invention or arrays thereof as well as a kit according to the present invention are intended to be used for the characterisation, classification, differentiation, grading, staging and/or diagnosis of astrocytomas. More preferably for the differentiation of Grade I and II astrocytomas, or diagnosis of predisposition to astrocytomas. According to the present invention, the method is preferably used for the analysis of important genetic and/or epigenetic parameters within genomic DNA, in particular for use in characterisation, classification, differentiation, grading, staging and/or diagnosis of astrocytomas, and predisposition to astrocytomas.

[0050] The method according to the present invention is used, for example, for characterisation, classification, differentiation, grading, staging and/or diagnosis of astrocytomas.

[0051] The nucleic acids according to the present invention of Seq. ID No.1 through Seq. ID No.120 can be used for characterisation, classification, differentiation, grading, staging and/or diagnosis of genetic and/or epigenetic parameters of genomic DNA, in particular for use in differentiation of Grade I and II astrocytomas.

[0052] The present invention moreover relates to a method for manufacturing a diagnostic reagent and/or therapeutic agent for characterisation, classification, differentiation, grading, staging and/or diagnosis of astrocytomas by analyzing methylation patterns of genomic DNA. The diagnostic reagent and/or therapeutic agent being characterized in that at least one nucleic acid according to the present invention (sequence IDs 1 through 120) is used for manufacturing it, preferably together with suitable additives and auxiliary agents.

[0053] A further subject matter of the present invention relates to a diagnostic reagent and/or therapeutic agent for astrocytoma by analyzing methylation patterns of genomic DNA, in particular for use in differentiation of Grade I and II astrocytomas, or diagnosis of the predisposition to brain tumors, the diagnostic reagent and/or therapeutic agent containing at least one nucleic acid according to the present invention (sequence IDs 1 through 120), preferably together with suitable additives and auxiliary agents.

[0054] The present invention moreover relates to the diagnosis and/or prognosis of events which are disadvantageous or relevant to patients or individuals in which important genetic and/or epigenetic parameters within genomic DNA, said parameters obtained by means of the present invention may be compared to another set of genetic and/or epigenetic parameters, the differences serving as the basis for a diagnosis and/or prognosis of events which are disadvantageous or relevant to patients or individuals.

[0055] In the context of the present invention the term “hybridization” is to be understood as a bond of an oligonucleotide to a completely complementary sequence along the lines of the Watson-Crick base pairings in the sample DNA, forming a duplex structure.

[0056] The term “functional variants” denotes all DNA sequences which are complementary to a DNA sequence, and which hybridize to the reference sequence under stringent conditions.

[0057] In the context of the present invention, “genetic parameters” are mutations and polymorphisms of genomic DNA and sequences further required for their regulation. To be designated as mutations are, in particular, insertions, deletions, point mutations, inversions and polymorphisms and, particularly preferred, SNPs (single nucleotide polymorphisms).

[0058] In the context of the present invention, “epigenetic parameters” are, in particular, cytosine methylations and further chemical modifications of DNA bases of genomic DNA and sequences further required for their regulation. Further epigenetic parameters include, for example, the acetylation of histones which, cannot be directly analyzed using the described method but which, in turn, correlates with the DNA methylation.

[0059] In the context of the present invention, the term ‘treatment’ as applied to astrocytomas is taken to include planning of suitable methods of patient treatment (e.g. surgery, radiation therapy, chemotherapy).

### BRIEF DESCRIPTION OF THE DRAWINGS

[0060] The patent or application file contains at least one drawing executed in color. Copies of this patent or patent application publication with color drawing(s) will be provided by the Office upon request and payment of the necessary fee.

[0061] FIG. 1 shows the hybridization of fluorescent labelled amplificates to a surface bound oligonecleotide.

[0062] FIG. 2A shows the differentiation of healthy control samples (labelled I) and astrocytoma grade I (labelled II) (FIG. 2A).

[0063] FIG. 2B shows the differentiation of healthy control sample and astrocytoma grade II (labelled III).

[0064] FIG. 3 shows the differentiation of astrocytoma grade I (1) and astrocytoma grade II (2).

[0065] FIG. 4 shows the separation of astrocytoma grade I (I) and astrocytoma grade II (II).

### DETAILED DESCRIPTION OF THE INVENTION

[0066] In the following, the present invention will be explained in greater detail on the basis of the sequences and examples with reference to the accompanying figures without being limited thereto.

[0067] FIG. 1 shows the hybridization of fluorescent labelled amplificates to a surface bound olignonucleotide. Sample I being from astrocytoma grade I (brain tumor) tissue and sample II being from astrocytoma grade II (brain tumor) tissue. Flourescence at a spot indicates hybridization of the amplificate to the olignonucleotide. Hybridization to a CG olignonucleotide denotes methylation at the cytosine position being analysed, hybridization to a TG olignonucleotide denotes no methylation at the cytosine position being analysed. It can be seen that Sample I was umethylated for CG positions (as indicated in example (1-4) of the amplificates of the genes TGF-alpha (cf. FIG. 1A), MLH1 (cf. FIG. 1B), NF1 (cf. FIG. 1C) and CSKN2B (FIG. 1D) whereas in comparison Sample II had a higher degree of methylation at the same position.

[0068] FIG. 2A shows the differentiation of healthy control samples (labelled I) and astrocytoma grade I (labelled II) (FIG. 2A), and healthy control sample and astrocytoma grade II (labelled III) (FIG. 2B). High probability of methylation corresponds to red, uncertainty to black and low probability to green. The labels on the left side of the plot are gene identifiers, the first 3 digits may be referenced in Table 1. The hybridization was done with Cy5 labelled amplificates generated by multiplex PCR reactions as shown in Table 1. The labels on the right side give the significance (p-value, T-test) of the difference between the means of the two groups. Each row corresponds to a single CpG and each column to the methylation levels of one sample. CpGs are ordered according to their contribution to the distinction to the differential diagnosis of the two lesions with increasing contribution from top to bottom.

[0069] FIG. 3 shows the differentiation of astrocytoma grade I (1) and astrocytoma grade II (2). High probability of methylation corresponds to red, uncertainty to black and low probability to green. The labels on the left side of the plot are gene and CpG identifiers. The hybridization was done with Cy5 labelled amplificates generated by multiplex PCR reactions as shown in Table 1. The labels on the right side give the significance (p-value, T-test) of the difference between the means of the two groups. Each row corresponds to a single CpG and each column to the methylation levels of one sample. CpGs are ordered according to their contribution to the distinction to the differential diagnosis of the two lesions with increasing contribution from top to bottom.

[0070] FIG. 4 shows the separation of astrocytoma grade I (I) and astrocytoma grade II (II). High probability of methylation corresponds to red, uncertainty to black and low probability to green. The labels on the left side of the plot are gene and CpG identifiers. The hybridization was done with Cy5 labelled amplificates of the genes MLHI, TGF-alpha and NF1, all generated by single gene PCR reactions. Each row corresponds to a single CpG and each column to the methylation levels of one sample. CpGs are ordered according to their contribution to the distinction to the differential diagnosis of the two lesions with increasing contribution from top to bottom.

[0071] Seq. ID No. 1 through Seq. ID No. 120

[0072] Sequences having odd sequence numbers (e.g., Seq. ID No. 1, 3, 5, . . . ) exhibit in each case sequences of chemically pretreated genomic DNAs. Sequences having even sequence numbers (e.g., Seq. ID No. 2, 4, 6, . . . ) exhibit in each case the sequences of chemically pretreated genomic DNAs. Said genomic DNAs are complementary to the genomic DNAs from which the preceeding sequence was derived (e.g., the complementary sequence to the genomic DNA from which Seq. ID No.1 is derived is the genomic sequence from which Seq. ID No.2 is derived, the complementary sequence to the genomic DNA from which Seq. ID No.3 is derived is the sequence from which Seq. ID No.4 is derived, etc.)

[0073] Seq. ID No. 121 through Seq. ID No. 136

[0074] Seq. ID No. 121 through Seq. ID No. 136 show the sequences of oligonucleotides that are used in the following Examples.

### EXAMPLE 1

### Methylation Analysis of the Gene TGF-alpha

[0075] The following example relates to a fragment of the gene TGF-alpha in which a specific CG-position is to be analyzed for methylation.

[0076] In the first step, a genomic sequence is treated using bisulfite (hydrogen sulfite, disulfite) in such a manner that all cytosines which are not methylated at the 5-position of the base are modified in such a manner that a different base is substituted with regard to the base pairing behavior while the cytosines methylated at the 5-position remain unchanged.

[0077] If bisulfite solution is used for the reaction, then an addition takes place at the non-methylated cytosine bases. Moreover, a denaturating reagent or solvent as well as a radical interceptor must be present. A subsequent alkaline hydrolysis then gives rise to the conversion of non-methylated cytosine nucleobases to uracil. The chemically converted DNA is then used for the detection of methylated cytosines. In the second method step, the treated DNA sample is diluted with water or an aqueous solution. Preferably, the DNA is subsequently desulfonated. In the third step of the method, the DNA sample is amplified in a polymerase chain reaction, preferably using a heat-resistant DNA polymerase. In the present case, cytosines of the gene TGF-alpha are analyzed. To this end, a defined fragment having a length of 533 bp is amplified with the specific primer oligonucleotides GGTTTGTTTGGGAGGTAAG (Sequence ID 121) and CCCCCTAAAAACACAAAA (Sequence ID No. 122). The single gene PCR reaction was performed on a thermocycler (Epperdorf GmbH) using bisulfite DNA 10 ng, primer 6 pmole each, dNTP 200 μM each, 1.5 mM MgCl2 and 1 U HotstartTaq (Qiagen AG). The other conditions were as recommended by the Taq polymerase manufacturer. In the multiplex PCR up to 16 primer pairs were used within the PCR reaction. The multiplex PCR was done according the single gene PCR with the following modifications: primer 0.35 pmole each, dNTP 800 μM each and 4.5 mM MgCl2. The cycle program for single gene PCR and multiplex PCR was as followed: step 1,14 min 96° C.; step 2, 60 sec 96° C.; step 3, 45 sec 55° C.; step 4 ,75 sec 72° C.; step 5, 10 min 72° C.; the step 2 to step 4 were repeated 39 fold.

[0078] The amplificate serves as a sample which hybridizes to an oligonucleotide previously bound to a solid phase, forming a duplex structure, for example AAGTTAGGCGTTTTTTGT (Sequence ID No. 123), the cytosine to be detected being located at position 382 of the amplificate. The detection of the hybridization product is based on Cy3 and Cy5 fluorescently labelled primer oligonucleotides which have been used for the amplification. A hybridization reaction of the amplified DNA with the oligonucleotide takes place only if a methylated cytosine was present at this location in the bisulfite-treated DNA. Thus, the methylation status of the specific cytosine to be analyzed is inferred from the hybridization product.

[0079] In order to verify the methylation status of the position, a sample of the amplificate is further hybridized to another oligonucleotide previously bonded to a solid phase. Said olignonucleotide is identical to the oligonucleotide previously used to analyze the methylation status of the sample, with the exception of the position in question. At the position to be analysed said oligonucleotide comprises a thymine base as opposed to a cytosine base i.e AAGTTAGGTGTTTTTTGT (Sequence ID No. 124). Therefore, the hybridization reaction only takes place if an unmethylated cytosine was present at the position to be analysed.

### EXAMPLE 2

### Methylation Analysis of the Gene NF1

[0080] The following example relates to a fragment of the gene NF1 in which a specific CG-position is to be analyzed for methylation.

[0081] In the first step, a genomic sequence is treated using bisulfite (hydrogen sulfite, disulfite) in such a manner that all cytosines which are not methylated at the 5-position of the base are modified in such a manner that a different base is substituted with regard to the base pairing behavior while the cytosines methylated at the 5-position remain unchanged.

[0082] If bisulfite solution is used for the reaction, then an addition takes place at the non-methylated cytosine bases. Moreover, a denaturating reagent or solvent as well as a radical interceptor must be present. A subsequent alkaline hydrolysis then gives rise to the conversion of non-methylated cytosine nucleobases to uracil. The chemically converted DNA is then used for the detection of methylated cytosines. In the second method step, the treated DNA sample is diluted with water or an aqueous solution. Preferably, the DNA is subsequently desulfonated. In the third step of the method, the DNA sample is amplified in a polymerase chain reaction, preferably using a heat-resistant DNA polymerase. In the present case, cytosines of the gene NF1 are analyzed. To this end, a defined fragment having a length of 600 bp is amplified with the specific primer oligonucleotides TTGGGAGAAAGGTTAGTTTT (Sequence ID 129) and ATACAAACTCCCAATATTCC (Sequence ID No. 130). The single gene PCR reaction was performed on a thermocycler (Epperdorf GmbH) using bisulfite DNA 10 ng, primer 6 pmole each, dNTP 200 μM each, 1.5 mM MgCl2 and 1 U HotstartTaq (Qiagen AG). The other conditions were as recommended by the Taq polymerase manufacturer. In the multiplex PCR up to 16 primer pairs were used within the PCR reaction. The multiplex PCR was done according the single gene PCR with the following modifications: primer 0.35 pmole each, dNTP 800 μM each and 4,5 mM MgCl2. The cycle program for single gene PCR and multiplex PCR was as followed: step 1,14 min 96° C.; step 2, 60 sec 96° C.; step 3, 45 sec 55° C.; step 4 ,75 sec 72° C.; step 5, 10 min 72° C.; the step 2 to step 4 were repeated 39 fold.

[0083] The amplificate serves as a sample which hybridizes to an oligonucleotide previously bound to a solid phase, forming a duplex structure, for example AATTAAAACGCCCTAAAA (Sequence ID No. 131), the cytosine to be detected being located at position 24 of the amplificate. The detection of the hybridization product is based on Cy3 and Cy5 fluorescently labelled primer oligonucleotides which have been used for the amplification. A hybridization reaction of the amplified DNA with the oligonucleotide takes place only if a methylated cytosine was present at this location in the bisulfite-treated DNA. Thus, the methylation status of the specific cytosine to be analyzed is inferred from the hybridization product.

[0084] In order to verify the methylation status of the position, a sample of the amplificate is further hybridized to another oligonucleotide previously bonded to a solid phase. Said olignonucleotide is identical to the oligonucleotide previously used to analyze the methylation status of the sample, with the exception of the position in question. At the position to be analysed said oligonucleotide comprises a thymine base as opposed to a cytosine base i.e. AATTAAAACACCCTAAAA (Sequence ID No. 132). Therefore, the hybridization reaction only takes place if an unmethylated cytosine was present at the position to be analysed.

### EXAMPLE 3

### Methylation Analysis of the Gene MLH1

[0085] The following example relates to a fragment of the gene MLH1 in which a specific CG-position is to be analyzed for methylation.

[0086] In the first step, a genomic sequence is treated using bisulfite (hydrogen sulfite, disulfite) in such a manner that all cytosines which are not methylated at the 5-position of the base are modified in such a manner that a different base is substituted with regard to the base pairing behavior while the cytosines methylated at the 5-position remain unchanged.

[0087] If bisulfite solution is used for the reaction, then an addition takes place at the non-methylated cytosine bases. Moreover, a denaturating reagent or solvent as well as a radical interceptor must be present. A subsequent alkaline hydrolysis then gives rise to the conversion of non-methylated cytosine nucleobases to uracil. The chemically converted DNA is then used for the detection of methylated cytosines. In the second method step, the treated DNA sample is diluted with water or an aqueous solution. Preferably, the DNA is subsequently desulfonated. In the third step of the method, the DNA sample is amplified in a polymerase chain reaction, preferably using a heat-resistant DNA polymerase. In the present case, cytosines of the gene MLHI are analyzed. To this end, a defined fragment having a length of 568 bp is amplified with the specific primer oligonucleotides TTTAAGGTAAGAGAATAGGT (Sequence ID 133) and TTAACCCTACTCTTATAACC (Sequence ID No. 134). The single gene PCR reaction was performed on a thermocycler (Epperdorf GmbH) using bisulfite DNA 10 ng, primer 6 pmole each, dNTP 200 μM each, 1.5 mM MgCl2 and 1 U HotstartTaq (Qiagen AG). The other conditions were as recommended by the Taq polymerase manufacturer. In the multiplex PCR up to 16 primer pairs were used within the PCR reaction. The multiplex PCR was done according the single gene PCR with the following modifications: primer 0.35 pmole each, dNTP 800 μM each and 4,5 mM MgCl2. The cycle program for single gene PCR and multiplex PCR was as followed: step 1,14 min 96° C.; step 2, 60 sec 96° C.; step 3, 45 sec 55° C.; step 4 ,75 sec 72° C.; step 5, 10 min 72° C.; the step 2 to step 4 were repeated 39 fold.

[0088] The amplificate serves as a sample which hybridizes to an oligonucleotide previously bound to a solid phase, forming a duplex structure, for example TTGTAGGACGTTTATATG (Sequence ID No. 135), the cytosine to be detected being located at position 125 of the amplificate. The detection of the hybridization product is based on Cy3 and Cy5 fluorescently labelled primer oligonucleotides which have been used for the amplification. A hybridization reaction of the amplified DNA with the oligonucleotide takes place only if a methylated cytosine was present at this location in the bisulfite-treated DNA. Thus, the methylation status of the specific cytosine to be analyzed is inferred from the hybridization product.

[0089] In order to verify the methylation status of the position, a sample of the amplificate is further hybridized to another oligonucleotide previously bonded to a solid phase. Said olignonucleotide is identical to the oligonucleotide previously used to analyze the methylation status of the sample, with the exception of the position in question. At the position to be analysed said oligonucleotide comprises a thymine base as opposed to a cytosine base i.e TTGTAGGATGTTTATATG (Sequence ID No. 136). Therefore, the hybridization reaction only takes place if an unmethylated cytosine was present at the position to be analysed.

### EXAMPLE 4

### Methylation Analysis of the Gene CSNK2B

[0090] The following example relates to a fragment of the gene CSNK2B in which a specific CG-position is to be analyzed for methylation.

[0091] In the first step, a genomic sequence is treated using bisulfite (hydrogen sulfite, disulfite) in such a manner that all cytosines which are not methylated at the 5-position of the base are modified in such a manner that a different base is substituted with regard to the base pairing behavior while the cytosines methylated at the 5-position remain unchanged.

[0092] If bisulfite solution is used for the reaction, then an addition takes place at the non-methylated cytosine bases. Moreover, a denaturating reagent or solvent as well as a radical interceptor must be present. A subsequent alkaline hydrolysis then gives rise to the conversion of non-methylated cytosine nucleobases to uracil. The chemically converted DNA is then used for the detection of methylated cytosines. In the second method step, the treated DNA sample is diluted with water or an aqueous solution. Preferably, the DNA is subsequently desulfonated. In the third step of the method, the DNA sample is amplified in a polymerase chain reaction, preferably using a heat-resistant DNA polymerase. In the present case, cytosines of the gene CSNK2B are analyzed. To this end, a defined fragment having a length of 524 bp is amplified with the specific primer oligonucleotides GGGGAAATGGAGAAGTGTAA (Sequence ID 125) and CTACCAATCCCAAAATAACC (Sequence ID No. 126).The single gene PCR reaction was performed on a thermocycler (Epperdorf GmbH) using bisulfite DNA 10 ng, primer 6 pmole each, dNTP 200 μM each, 1.5 mM MgCl2 and 1 U HotstartTaq (Qiagen AG). The other conditions were as recommended by the Taq polymerase manufacturer. In the multiplex PCR up to 16 primer pairs were used within the PCR reaction. The multiplex PCR was done according the single gene PCR with the following modifications: primer 0.35 pmole each, dNTP 800 μM each and 4,5 mM MgCl2. The cycle program for single gene PCR and multiplex PCR was as followed: step 1,14 min 96° C.; step 2, 60 sec 96° C.; step 3, 45 sec 55° C.; step 4 ,75 sec 72° C.; step 5, 10 min 72° C.; the step 2 to step 4 were repeated 39 fold.

[0093] The amplificate serves as a sample which hybridizes to an oligonucleotide previously bound to a solid phase, forming a duplex structure, for example TAGGTTAGCGTATTGGGA (Sequence ID No. 127), the cytosine to be detected being located at position 50 of the amplificate. The detection of the hybridization product is based on Cy3 and Cy5 fluorescently labelled primer oligonucleotides which have been used for the amplification. A hybridization reaction of the amplified DNA with the oligonucleotide takes place only if a methylated cytosine was present at this location in the bisulfite-treated DNA. Thus, the methylation status of the specific cytosine to be analyzed is inferred from the hybridization product.

[0094] In order to verify the methylation status of the position, a sample of the amplificate is further hybridized to another oligonucleotide previously bonded to a solid phase. Said olignonucleotide is identical to the oligonucleotide previously used to analyze the methylation status of the sample, with the exception of the position in question. At the position to be analysed said oligonucleotide comprises a thymine base as opposed to a cytosine base i.e. TAGGTTAGTGTATTGGGA (Sequence ID No. 128). Therefore, the hybridization reaction only takes place if an unmethylated cytosine was present at the position to be analysed.

### EXAMPLE 5

### Differentiation of Healthy Samples and Astrocytoma Grade I and Grade II Tumours Isolated From Cerebrum

[0095] In order to relate the methylation patterns to a specific tumour type, it is initially required to comparatively analyze the DNA methylation patterns of two groups of patients with alternative forms of a tumor, in this case one group of astrocytoma grade I and another group of astrocytoma grade II, with those of healthy tissue (FIGS. 2A and B). These analyses were carried out, analogously to Examples 1-4. The results obtained in this manner are stored in a database and the CpG dinucleotides which are methylated differently between the two groups are identified. This can be carried out by determining individual CpG methylation rates as can be done, for example, by sequencing, which is a relatively imprecise method of quantifying methylation at a specific CpG, or else, in a very precise manner, by a methylation-sensitive “primer extension reaction”. In a particularly preferred variant, as illustrated in the preceeding examples the methylation status of hundreds or thousands of CpGs may be analysed on an oligomer array. It is also possible for the patterns to be compared, for example, by clustering analyses which can be carried out, for example, by a computer.

[0096] All clinical specimens were obtained at time of surgery, i.e. in a routine clinical situation (Santourlidis, S., Prostate 39:166-174, 1999, Florl, A. R., Br. J. Cancer 80:1312-1321, 1999). A panel of genomic fragments from 64 different genes (listed in Table 1) were bisulphite treated and amplified by 6 sets of multplex PCRs (mPCR) according to Example 1 . The mPCR reactions (I,J,K,L,M,N) of the genomic, bisulphite treated DNA was done using the combination of primer pairs as indicated in Table 1. However, as will be obvious to one skilled in the art, it is also possible to use other primers that amplify the genomic, bisulphite treated DNA in an adequate manner. However the primer pairs as listed in Table 1 are particularly preferred. In order to differentiate astrocytoma grade I from healthy control samples optimal results were obtained by including at least 6 CpG dinucleotides, the most informative CpG positions for this discrimination being located within the OAT, GP1B, cMyc,UNG,TIMP3 and cABL genes (cf. FIG. 2A, Tab1). In order to differentiate astrocytoma grade I from healthy control samples optimal results were obtained by including at least 6 CpG dinucleotides, the most informative CpG positions for this discrimination being located within the cMyc, EGR4, ApoA1, AR and heatshock genes (cf. FIG. 2B, Tab1). In addition, the majority of the analysed CpG dinucleotides of the panel showed different methylation patterns between the two phenotypes. The results prove that methylation fingerprints are capable of providing differential diagnosis of solid malignant tumours and could therefore be applied in a large number clinical situations.

### EXAMPLE 6

### Differentiation of Astrocytoma Grade I and Grade II Tumours

[0097] In order to relate the methylation patterns to a specific tumour type, it is initially required to analyze the DNA methylation patterns of two groups of patients with alternative forms of a tumor, in this case one group of astrocytoma grade I and another group of astrocytoma grade II. These analyses were carried out, analogously to Example 1. The results obtained in this manner are stored in a database and the CpG dinucleotides which are methylated differently between the two groups are identified. This can be carried out by determining individual CpG methylation rates as can be done, for example, by sequencing, which is a relatively imprecise method of quantifying methylation at a specific CpG, or else, in a very precise manner, by a methylation-sensitive “primer extension reaction”. In a particularly preferred variant, as illustrated in examples 1 to 4 the methylation status of hundreds or thousands of CpGs may be analysed on an oligomer array. It is also possible for the patterns to be compared, for example, by clustering analyses which can be carried out, for example, by a computer.

[0098] All clinical specimens were obtained at time of surgery, i.e. in a routine clinical situation (Santourlidis, S., Prostate 39:166-174, 1999, Florl, A. R., Br. J. Cancer 80:1312-1321, 1999). A panel of genomic fragments from 56 different genes (listed in Table 1) were bisulphite treated and amplified by 6 sets of multplex PCRs (mPCR), named I,J,K,L,M and N, in Table 1, according to Example 1. The mPCR reactions of the genomic, bisulphite treated DNA was done using the combination of primer pairs as indicated in Table 1. It will be obvious to one skilled in the art, that it is also possible to use other primers that amplify the genomic, bisulphite treated DNA in an adequate manner. However the primer pairs as listed in Table 1 are particularly preferred. Optimal results were obtained by including at least 8 CpG dinucleotides, the most informative CpG positions for this discrimination being located within the CSKNB2, NF1, M1H, EGR4, AR; TGF-alpha, and APOC2 genes (cf. FIG. 3). In addition, the majority of the analysed CpG dinucleotides of the panel showed different methylation patterns between the two phenotypes. The results prove that methylation fingerprints are capable of providing differential diagnosis of solid malignant tumours and could therefore be applied in a large number clinical situations.

### EXAMPLE 7

### Differentiation of Astrocytoma Grade I and Grade II Tumours Using DNA Fragments Derived From TGF-alpha, NF1 and MlH1 Gene

[0099] The methylation patterns of CpG islands derived from TGF-alpha, NF1 and M1H1 genes were analysed. In order to evaluate the genes, already identified differentiating astrocytoma grade I and grade II tumours in the class prediction approach (cf. Example 6) The genes TGF-alpha, NF1 and M1H1 gene were amplified from genomic bisulfite treated DNA as described in examples 1,2 and 3. The DNA was prepared from tissue samples of two groups of patients with alternative forms of a tumor, in this case one group of astrocytoma grade I and another group of astrocytoma grade II. Optimal results were obtained by including at least 6 CpG dinucleotides, the most informative CpG positions for this discrimination being located within the TGF-alpha and NF1 and M1H1 genes (cf. FIG. 4). The results further validate the results of methylation fingerprints shown in example 6.

TABLE 1

List of genes, reference numbers and primer
oligonucleotides according to Examples 1-7 and FIGS. 1-4.

| | | | | |
|---|---|---|---|---|
| GENE | | | | |
| ID (in | MPCR | | | |
| FIGS.) | SET | GENE | PCR PRIMER | PCR PRIMER |

| | | | | |
|---|---|---|---|---|
| 81 | N | ADCYAP1 | GGTGGATTTATGGTTATTTTG | TCCCTCCCTTACCCTTCAAC |
| | | | SEQ ID NO: 137 | SEQ ID NO: 138 |
| 292 | K | AFP | AGGTTTATTGAATATTTAGG | AACATATTTCCACAACATCC |
| | | SEQ ID NOS: 1, 2 | SEQ ID NO: 139 | SEQ ID NO: 140 |
| 85 | L | ANT1 | GTTTAAGGTTGTTTGTGTTATAAAT | CCTCCTCCCAACTACAAAA |
| | | SEQ ID NOS: 89, 90 | SEQ ID NO: 141 | SEQ ID NO: 142 |
| 48 | L | APOA1 | GTTGGTGGTGGGGGAGGTAG | ACAACCAAAATCTAAACTAA |
| | | SEQ ID NOS: 3, 4 | SEQ ID NO: 143 | SEQ ID NO: 144 |
| 50 | N | APOC2 | ATGAGTAGAAGAGGTGATAT | CCCTAAATCCCTTTCTTACC |
| | | SEQ ID NOS: 5, 6 | SEQ ID NO: 145 | SEQ ID NO: 146 |
| 87 | K | AR | GTAGTAGTAGTAGTAAGAGA | ACCCCCTAAATAATTATCCT |
| | | SEQ ID NOS: 99, 100 | SEQ ID NO: 147 | SEQ ID NO: 148 |
| 1143 | L | ATP5A1 | AGTTTGTTTTAATTTATTGATAGGA | AACAACATCTTTACAATTACTCC |
| | | SEQ ID NOS: 7, 8 | SEQ ID NO: 149 | SEQ ID NO: 150 |
| 1011 | L | CABL | GGTTGGGAGATTTAATTTTATT | ACCAATCCAAACTTTTCCTT |
| | | SEQ ID NOS: 9, 10 | SEQ ID NO: 151 | SEQ ID NO: 152 |
| 77 | L | CD1A | ATTATGGTTGGAATTGTAAT | ACAAAAACAACAAACACCCC |
| | | SEQ ID NOS: 11, 12 | SEQ ID NO: 153 | SEQ ID NO: 154 |
| 1079 | L | CD63 | TGGGAGATATTTAGGATGTGA | CTCACCTAAACTTCCCAAA |
| | | SEQ ID NOS: 13, 14 | SEQ ID NO: 155 | SEQ ID NO: 156 |
| 99 | M | CDC25A | AGAAGTTGTTTATTGATTGG | AAAATTAAATCCAAACAAAC |
| | | SEQ ID NOS: 15, 16 | SEQ ID NO: 157 | SEQ ID NO: 158 |
| 187 | L | CDH3 | GTTTAGAAGTTTAAGATTAG | CAAAAACTCAACCTCTATCT |
| | | SEQ ID NOS: 17, 18 | SEQ ID NO: 159 | SEQ ID NO: 160 |
| 88 | K | CDK4 | TTTTGGTAGTTGGTTATATG | AAAAATAACACAATAACTCA |
| | | SEQ ID NOS: 91, 92 | SEQ ID NO: 161 | SEQ ID NO: 162 |
| 310 | I | CFOS | TTTTGAGTTTTAGAATTGTTTTTAG | AAAAACCCCCTACTCATCTACTA |
| | | SEQ ID NOS: 19, 20 | SEQ ID NO: 163 | SEQ ID NO: 164 |
| 1034 | L | CMYC | TTTTGTGTGGAGGGTAGTTG | CCCCAAATAAACAAAATAACC |
| | | SEQ ID NOS: 21, 22 | SEQ ID NO: 165 | SEQ ID NO: 166 |
| 312 | K | CMYC | TTGTTTTTGTGGAAAAGAGG | TTTCAATCTCAAAACTCAACC |
| | | SEQ ID NOS: 21, 22 | SEQ ID NO: 167 | SEQ ID NO: 168 |
| 313 | I | CMYC | AAAGGTTTGGAGGTAGGAGT | TTCCTTTCCAAATCCTCTTT |
| | | SEQ ID NOS: 21, 22 | SEQ ID NO: 169 | SEQ ID NO: 170 |
| 37 | M | CRIP1 | TTTAGGTTTAGGGTTTAGTT | CCACTCCAAAACTAATATCA |
| | | SEQ ID NOS: 23, 24 | SEQ ID NO: 171 | SEQ ID NO: 172 |
| 70 | N | CSF1 | TAGGGTTTGGAGGGAAAG | AAAAATCACCCTAACCAAAC |
| | | SEQ ID NOS: 25, 26 | SEQ ID NO: 173 | SEQ ID NO: 174 |
| 78 | M | CSNK2B | GGGGAAATGGAGAAGTGTAA | CTACCAATCCCAAAATAACC |
| | | SEQ ID NOS: 27, 28 | SEQ ID NO: 175 | SEQ ID NO: 176 |
| 272 | N | CTLA4 | TTTTTATGGAGAGTAGTTGG | TAACTTTACTCACCAATTAC |
| | | SEQ ID NOS: 29, 30 | SEQ ID NO: 177 | SEQ ID NO: 178 |
| 287 | K | DAD1 | TTTTGTTGTTAGAGTAATTG | ACCTCAATTTCCCCATTCAC |
| | | SEQ ID NOS: 31, 32 | SEQ ID NO: 179 | SEQ ID NO: 180 |
| 147 | I | DAPK1 | ATTAATATTATGTAAAGTGA | CTTACAACCATTCACCCACA |
| | | SEQ ID NOS: 33, 34 | SEQ ID NO: 181 | SEQ ID NO: 182 |
| 319 | J | E-CADHERIN | GGGTGAAAGAGTGAGTTTTATTT | ACTCCAAAAACCCATAACTAA |
| | | SEQ ID NOS: 93, 94 | SEQ ID NO: 183 | SEQ ID NO: 184 |
| 63 | M | EGFR | GGTGTTTGATAAGATTTGAAG | CCCTTACCTTTCTTTTCCT |
| | | SEQ ID NOS: 35, 36 | SEQ ID NO: 185 | SEQ ID NO: 186 |
| 311 | I | EGFR | GGGTAGTGGGATATTTAGTTTTT | CCAACACTACCCCTCTAA |
| | | SEQ ID NOS: 35, 36 | SEQ ID NO: 187 | SEQ ID NO: 188 |
| 82 | M | EGR4 | AGGGGGATTGAGTGTTAAGT | CCCAAACATAAACACAAAAT |
| | | SEQ ID NOS: 35, 36 | SEQ ID NO: 189 | SEQ ID NO: 190 |
| 1012 | L | ELK1 | AAGTGTTTTAGTTTTTAATGGGTA | CAAACCCAAAACTCACCTAT |
| | | SEQ ID NOS: 39, 40 | SEQ ID NO: 191 | SEQ ID NO: 192 |
| 307 | J | ERBB2 | GAGTGATATTTTTATTTTATGTTTGG | AAAACCCTAACTCAACTACTCAC |
| | | SEQ ID NOS: 41, 42 | SEQ ID NO: 193 | SEQ ID NO: 194 |
| 308 | K | ERBB2 | GAGTTTGGGAGTTTAAGATTAGT | TCAACTTCACAACTTCATTCTTAT |
| | | SEQ ID NOS: 41, 42 | SEQ ID NO: 195 | SEQ ID NO: 196 |
| 130 | N | GP1B | GGTGATAGGAGAATAATGTTGG | TCTCCCAACTACAACCAAAC |
| | | SEQ ID NOS: 43, 44 | SEQ ID NO: 197 | SEQ ID NO: 198 |
| 290.2 | M | HEAT SHOCK | AGAGGAGATATTTTTTATGG | AAAAATCCTACAACAACTTC |
| | | SEQ ID NOS: 45, 46 | SEQ ID NO: 199 | SEQ ID NO: 200 |
| 290.3 | J | HEAT SHOCK | AAGGATAATAATTTGTTGGG | CTTAAATACAAACTTAATCC |
| | | SEQ ID NOS: 45, 46 | SEQ ID NO: 201 | SEQ ID NO: 202 |
| 89 | I | HUMOS | TTTATTGATTGGGAGTAGGT | CTAATTTTACAAACATCCTA |
| | | SEQ ID NOS: 47, 48 | SEQ ID NO: 203 | SEQ ID NO: 204 |
| 1083 | N | IL13 | TTTTTAGGGTAGGGGTTGT | CCTTATCCCCCATAACCA |
| | | SEQ ID NOS: 49, 50 | SEQ ID NO: 205 | SEQ ID NO: 206 |
| 1010 | L | LMYC | AGGTTTGGGTTATTGAGTTT | CATTATTTCCTAACTACCTTATATCTC |
| | | SEQ ID NOS: 51, 52 | SEQ ID NO: 207 | SEQ ID NO: 208 |
| 291 | L | MC2R | ATATTTGATATGTTGGGTAG | ACCTACTACAAAAAATCATC |
| | | SEQ ID NOS: 53, 54 | SEQ ID NO:209 | SEQ ID NO: 210 |
| 314.2 | I | MGMT | AAGGTTTTAGGGAAGAGTGTTT | ACTCCCAATACCTCACAATATAAC |
| | | SEQ ID NOS: 55, 56 | SEQ ID NO: 211 | SEQ ID NO: 212 |
| 427 | K | MHC | GGGTATTAGGAATTTATGTG | CAAAACACCTTCCTAACTCA |
| | | SEQ ID NOS: 103, 104 | SEQ ID NO: 213 | SEQ ID NO:214 |
| 401 | I | MHC | TTGTTGTTTTTAGGGGTTTTGG | TCCTTCCCATTCTCCAAATATC |
| | | SEQ ID NOS: 105, 106 | SEQ ID NO: 215 | SEQ ID NO: 216 |
| 458 | M | MHC | AAGAGTGAGAAGTAGAGGGTT | CTACTCTCTAAAACTCCAAAC |
| | | SEQ ID NOS: 107, 108 | SEQ ID NO: 217 | SEQ ID NO: 218 |
| 487 | M | MHC | GAGGTTAAAGGAAGTTTTGGA | AAACTAAATTCTCCCAATACC |
| | | SEQ ID NOS: 109, 110 | SEQ ID NO: 219 | SEQ ID NO: 220 |
| 465 | L | MHC | ATTGATAGGTAGTTAGATTGG | AAAAAACTCTCATAAATCTCA |
| | | SEQ ID NOS: 111, 112 | SEQ ID NO: 221 | SEQ ID NO: 222 |
| 451 | M | MHC | AGGAGGAAGGGTTAATAAAGA | ATCTTCCTACTACTATCTCTAAC |
| | | SEQ ID NOS: 113, 114 | SEQ ID NO: 223 | SEQ ID NO: 224 |
| 441 | M | MHC | AGGTTGGATTTTGGGTAGGT | TCTCCTACTCTCCTAATCTC |
| | | SEQ ID NOS: 115, 116 | SEQ ID NO: 225 | SEQ ID NO: 226 |
| 160 | M | MLH1 | TTTAAGGTAAGAGAATAGGT | TTAACCCTACTCTTATAACC |
| | | SEQ ID NOS: 57, 58 | SEQ ID NO: 227 | SEQ ID NO: 228 |
| 94 | N | N33 | TGGAGGAGATATTGTTTTGT | TTTTTCAAATCAAAACCCTACT |
| | | SEQ ID NOS: 59, 60 | SEQ ID NO: 229 | SEQ ID NO: 230 |
| 302 | J | NF1 | TTGGGAGAAAGGTTAGTTTT | ATACAAACTCCCAATATTCC |
| | | SEQ ID NOS: 61, 62 | SEQ ID NO: 231 | SEQ ID NO: 232 |
| 1009 | L | NMYC | GGAGGAGTATATTTTGGGTTT | ACAAACCCTACTCCTTACCTC |
| | | SEQ ID NOS: 63, 64 | SEQ ID NO: 233 | SEQ ID NO: 234 |
| 1018 | N | NUC | AAGTTGTGTTTTTAAAAGGGTTA | AAAAACTAAACCTACCCAATAA |
| | | | SEQ ID NO: 235 | SEQ ID NO: 236 |
| 1007 | N | OAT | TGGAGGTGGATTTAGAGGTA | ACCAAAACCCCAAAACAA |
| | | SEQ ID NOS: 67, 68 | SEQ ID NO: 237 | SEQ ID NO: 238 |
| 304 | J | P16 | AGGGGTTGGTTGGTTATTAG | TAATTCCAATTCCCCTACAA |
| | | SEQ ID NOS: 95, 96 | SEQ ID NO: 239 | SEQ ID NO: 240 |
| 305 | J | P53 | GTGATAAGGGTTGTGAAGGA | CAAAAACTTACCCAATCCAA |
| | | SEQ ID NOS: 101, 102 | SEQ ID NO: 241 | SEQ ID NO: 242 |
| 1069 | N | POMC | AGTTTTTAAATAATGGGGAAAT | ACTCTTCTTCCCCTCCTTC |
| | | SEQ ID NOS: 69, 70 | SEQ ID NO: 243 | SEQ ID NO: 244 |
| 177 | N | PRG | AGTTGAAGTTATAAGGGGTG | AATAAAAACTCTCAAAAACC |
| | | SEQ ID NOS: 71, 72 | SEQ ID NO: 245 | SEQ ID NO: 246 |
| 26 | K | SOD1 | AGGGGAAGAAAAGGTAAGTT | CCCACTCTAACCCCAAACCA |
| | | SEQ ID NOS: 73,74 | SEQ ID NO: 247 | SEQ ID NO: 248 |
| 303 | I | TGF-A | GGTTTGTTTGGGAGGTAAG | CCCCCTAAAAACACAAAA |
| | | SEQ ID NOS: 75, 76 | SEQ ID NO: 249 | SEQ ID NO: 250 |
| 301 | J | TGF-B1 | GGGGAGTAATATGGATTTGG | CCTTTACTAAACACCTCCCATA |
| | | SEQ ID NOS: 77, 78 | SEQ ID NO: 251 | SEQ ID NO: 252 |
| 317 | I | TIMP3 | GTAAGGGTTTTGTGTTGTTT | CCCCCTCAAACCAATAAC |
| | | SEQ ID NOS: 97, 98 | SEQ ID NO: 253 | SEQ ID NO: 254 |
| 128 | N | TNFB | TTTTTGTTTTTGATTGAAATAGTAG | AAAAACCCCAAAATAAACAA |
| | | | SEQ ID NO: 255 | SEQ ID NO: 256 |
| 35 | L | UBB | TTAAGTTATTTTAGGTGGAGTTTA | ACCAAAATCCTACCAATCAC |
| | | SEQ ID NOS: 81, 82 | SEQ ID NO: 257 | SEQ ID NO: 258 |
| 1140 | N | UNG | GTTGGGGTGTTTGAGGAA | CCTCTCCCCTCTAATTAAACA |
| | | SEQ ID NOS: 83, 84 | SEQ ID NO: 259 | SEQ ID NO: 260 |
| 300 | J | VEGF | TGGGTAATTTTTAGGTTGTGA | CCCCAAAAACAAATCACTC |
| | | SEQ ID NOS: 85, 86 | SEQ ID NO: 261 | SEQ ID NO: 262 |
| 188 | K | WT1 | AAAGGGAAATTAAGTGTTGT | TAACTACCCTCAACTTCCC |
| | | SEQ ID NOS: 87, 88 | SEQ ID NO: 263 | SEQ ID NO: 264 |

1. A method for determining genetic and/or epigenetic parameters for the characterisation, classification, differentiation, grading, staging, treatment and/or diagnosis of astrocytomas, or the predisposition to astrocytomas by analysing cytosine methylations, characterised in that the following steps are carried out:
a) obtaining a biological sample containing genomic DNA,
b) extracting the genomic DNA,
c) in said genomic DNA sample, cytosine bases which are unmethylated at the 5-position are converted, by chemical treatment, to uracil or another base which is dissimilar to cytosine in terms of hybridization behavior;
d) fragments of the chemically pretreated genomic DNA are amplified using sets of primer oligonucleotides and a polymerase, the amplificates carrying a detectable label,
e) identifying the methylation status of one or more cytosine positions, and
f) analysis of the methylation status of the cytosine positions by reference to one or more data sets,
wherein said cytosine bases of said genomic CpG sequences are located within at least one of the genes associated with astrocytomas, or the predisposition to astrocytomas according to one of the sequences taken from the group of Seq. ID No.1 to Seq. ID No.120 and/or sequences of a chemically pretreated DNA of genes according to table 1 and sequences complementary thereto and segments thereof.

2. Method according to claim 1, characterised in that the amplification step preferentially amplifies DNA which is of particularly interest in astrocytoma or brain tissue, based on the specific genomic methylation status of brain tissues, as opposed to background DNA.

3. Method according to claim 1, further comprising the step of hybridising the amplificates to a set of oligomers (oligonucleotides and/or PNA probes) or to an array, wherein the base sequence of the oligomers includes at least one CpG dinucleotide.

4. Method according to claim 1, characterised in that the chemical treatment is carried out by means of a solution of a bisulfite, hydrogen sulfite or disulfite.

5. Method according to claim 1, characterised in that more than ten different fragments having a length of 100-2000 base pairs are amplified.

6. Method according to claim 1, characterised in that the genomic DNA is obtained from cells or cellular components which contain DNA, sources of DNA comprising, for example, cell lines, biopsies, blood, lymphatic fluid, sputum, stool, urine, cerebral-spinal fluid, tissue embedded in paraffin such as tissue from eyes, intestine, kidney, brain, heart, prostate, lung, breast or liver, histologic object slides, and all possible combinations thereof.

7. Method according to claim 1, further comprising the step of performing a characterisation, classification, differentiation, grading, staging, treatment and/or diagnosis of a disease associated with astrocytomas or the predisposition to astrocytomas.

8. An oligomer, in particular an oligonucleotide or peptide nucleic acid (PNA)-oligomer, said oligomer comprising in each case at least one base sequence having a length of at least 9 nucleotides which hybridises to or is identical to a chemically pretreated DNA of genes associated with astrocytomas or the predisposition to astrocytomas according to one of the Seq. ID No.1 to Seq. ID No.120 or to the genomic sequence of genes according to table 1 and sequences complementary thereto, wherein the base sequence of said oligomers is not identical to the genomic sequence of one of the Seq. ID No. 1 to Seq. ID No. 120 or to the genomic sequence of genes according to table 1 and sequences complementary thereto.

9. The oligomer as recited in claim 8; wherein the base sequence includes at least one CpG dinucleotide, the cytosine of the CpG dinucleotide being located in the middle third of the oligomer.

10. A kit useful for the diagnosis of diseases associated with astrocytomas or the predisposition to astrocytomas, comprising a) a bisulfite (=disulfite, hydrogen sulfite) reagent, and b) oligonucleotides and/or PNA-oligomers according to claim 8.

11. Kit according to claim 10, which contains further reagents for performing a methylation assay from the group consisting of MS-SNuPE and COBRA.

12. A nucleic acid comprising a sequence at least 18 bases in length of a segment of the chemically pretreated DNA of genes associated with astrocytomas or the predisposition to astrocytomas according to one of the Seq. ID No. 1 to Seq. ID No. 120 and sequences complementary thereto, wherein the base sequence of said nucleic acid is not identical to the genomic sequence of one of the Seq. ID No. 1 to Seq. ID No. 120.

The application's sequence listing, which the Patent Office published only in electronic form, follows.

SEQUENCE LISTING (264 sequences)

SEQ ID NO: 1 - DNA, 7001 bp, Artificial Sequence
  chemically treated genomic DNA (Homo sapiens)
tattgttttgttttgttttttagttaataatatattatgagtatatttttattttattaaatatttttttataaagttattttgatggttgtatattattttattttatgaatgtattatattaatttattttttggtgtgggttatttgattttataattttatttttagaataatgaaatatttgtgaagttttagaaaatattggtgtttgggttttaattttatagattttgatttaattggtttgggttatagattaggtattgggaatttaaaaagtttttttagtgattttaatgtgtagttaagatcgggaatttttgtagatagggatgataggaggtgagttatttttagtatttattatttagtattaatattattattttgagttgttaagtgaatgatgtatttgatttattttataaagatatatgtgtaaataaaattattataggatttggtttattagggtttgtgttttaagttttttatgttaagttatatatcgtatattaaatattttaaaatgtattttattgatatatatattaagtgaaaagtgtttttgagttaaataatgatagtataattattaagtaatgataatttgaaatgaatttattattttgtaatttagggataagttatttttttgaattttttgtattttgagagtatttgttatatttgtaagatgaagagtttgaattggttagataatgttttgtgtgtttggtatatgataggtatttaatagttttaaagaattaatgtatttagatgaattgtatattaaatttgttgttttttttttatggttttattaatttaatttgagagaaattaattattttgtaatttagggataagttatgtttttgaatattttgtagtttgaggagaatatttgttatatttgtaaaataaaataagtttgtaagttttttttttttgttttaaagagttttgtgtttttgaatataaaatataaataatcgttatgttgttaattattggtaaatgttttatttttaatttaaggaaatattataaagtaatagatatattaataaaaggttattagttaataggtattgtttgaaaagagtataaaagaattttagtatgattttttatattgtgtttttattattgttaataataaaataattagtaattatgaagtgggtggaattaatttttttaatttttttattaaattttattgaatttagaatattgtatagaaatgaatatggaataggtgagatattttgtgttttttttgttttttttttatattaaaattttttaaattataaaatttgtattaatttgttttgatttattatttatatttattattttatatggagaaaaaatatttaattgatggatatatttaaatgaaagaaaaatttgtaattttataagaggtttataaagttatagtagtgtttaatggatgaatggtttgtatgttttatgttgaattaatttttatattttaatggtatgtatattaattttgaaaaattatatatatatatatatatgtatatatatatgaatataaataaaattttatatgtgaagaagttagaattatgtttttttatataatttttttagattagtaaaatagataaaatttttgtttttaatatagaaaaatgggttattatttgatggtttgaagaagaaatattgtgattgggatatgaatggtaaatcgtagtataattatgtttaaaagaatgtttgaaatatatttttaattatttgatttttaggatagttatagtattatagtatagggaaaaattaaataattggaagataaaatttggattttagtgataggtttattataaattatgtttgttaattttattttttagttttttagtttttttttttttaagtataaaattaagatgtttaggttatttttaatgtttttttaattttgaaattgtatagttttaattgaaatataaatatttatatgtaataatgattatttttttggttgtagttgaaaatacgttttatgaagtttattttgttttttagtttttatattggatttttattaatgtattgtagagataagtttagttgatttgtaagttttgtttatataaatgtattttaaatgtgtaaagtaaggataagtaaatatttaaataaaattgggtatttttgtgagtttttaaaagtataaaagtaatttggataattttaagaaaagttatttatattgaatattaatttgatgttgaagaggttaaattgttgattaatgttttcgatattgattttttgattttttgaaattttatgagttaaattaaattagattttagaaattgaagattagtgtttgattagtgataattatatattaatttaggaattttttttattagtattaatagggtgatattataatgtttttttttttgtatattatttaaattttagtagtaaattataggtgataaaatattttatttgttgttatttgtggagagtatgttagttttttggatgtttttttattttatattttaaaaatttttaataaagaatttaaagtagtgtgttgttgttattttttgtatatttaaatttgtataaggattgttttgagttaatttatgagtattgtagttttgggttttagattttgattatattgggaatagatattgttagaggtttgtttaattattaatttttttttgtttaaatttaaaagtaattataaagaatatagatatttttaattatgggtatattatagtagatggatggttatagaaggagaaattatttttatgggaaatttatttattttagtttttaatatttatatgtatatttatggtaaaagaaaataagaaaaagattaaagtttttttttagatgatttggaagttaattttatataattttataaattaaatgtttaaatagattataatataaatagaaaataaaataaataaatgaaaaattatatttgagaaaaataagtttgttgtaggtttgttttttaaggatttatacgtatttttgttttagggttattatattttttgtttagtttgtttaagaagttatttataaggaagtaagtaaaatggtgaaagatgtattgattgtaattgagaaatttattggagatgaatagtttttagggtgtttagaaaattaggtgagtgaataattttaaaaaagtattgtgatatttgataaaaatttagtatgttgaagagaagatataaaaatagtagtgaaaaatgtatttaaatatttgaagagttattgtatgaaagagggattagatttattttgaattgttaaagagggtagaagagaataataggtagttattataaagagattatataaatatgatgaattaaggttttgaaataagattattttgatgattatgggtatattaatttttttgagttttagtttttttatttgtaaaataagggatgataatagtttttattttatagttagtatggaaattgatataatagtaatagtagttaatttttattatatatataatgtgattggtattattttagggagtataatgtgtatattgataataaaaatattttatgatataggggatagatagtattgatgaattagaatggttgtttagtgagttaagagatgttggttcgggtttttgggtaggatattagttttgtttatttatatttatttattaaatatttaaaataatttttgaagatagatgttaattttttaattgaggaagttgaggtttagagaatttaagtaatttttttatgggaattattaaatggtagagttaggatttgaattagattatttggtttaaaattgatagttttagtagttttattatattataattatagtgaatgtaagatgtatagtatatcgttagggttgttaggtttagtaaataataataaaatataatatttagtttaatttgaattttagataaatattaaatattttttttagtataaggatattttattgtagaagtttaataaataatatttattatttattttattttaatatagaaataaatttgataatgattagaattttttaattataaaataatatgtttagagaatattttgttatggtggggttaattaggtggttgaaagataatgtatttggaatattatagaagagatgtttttttaaggatatagtttaagttttttttaattttgaaatttatgaattgataaaaatttttgttttgtatttttatttttgttttgttttgataatttttttaaaatgtgtataaaaaaataagaatatattatttattgtaattttataattaattagaggtttaaggtaatgttatagatcgttgatttatttttgtaaatttaaaggtatgttttttaaatgaggattgggaattagaaattttacgtaagttttttaggattttttaaatattattgtagtagttataaaagttatataaaagtttttttagatatatgaaatatatgtattttttagatgttttttgtggaatattgatgttgttatttgagtttggtaagggtaagttatagaggaggaaatatatatattttaaaatattttagttaaatatgtaattgtggttaagaaaagtgtttttttaaaaaataattattttattttaaaattatttttatttataattgaaaataatatgtagttttttattgttttgtaaggatggtatgtaaaatgagtatttatgtttgaaatgtggtatgtttgtgtgtgtgtgtgtatatgtatatatgtatgtatatattataatatatatatatgtatttgtaattttaaaagttatatttttaatgagaattatgaaaatattattttgtttagtttttttttttatttaaatttaaatttaaagttttggtgtatacgggtaggatgagtaggtttgttatataggtaaatacgtggtatggtggtttgttgtatttattaatttgttgtttgggtattaagtttagcgtgtattatttattttttttaatgttttttttttttgtattttattttttgataggttttagtgtgtgttgtttttttttttgtgtttatgaaatatggtttatatatttataaaagtttatatattttagtttaaatttttgataatataaaaaggaaaaataaaataatttaaaattgggaaagagaaataaaagattgtatggtttttttttttttattgtttggatattaaagttttattttttataaggtagtaaagaaatttattttattaggttgaaataaaatatattagaatttgtatggaaaattttttagaatttatagttttgattttagatattagaaaatgttttatgtgttttatagatttttaaagtaaagttagttgtttttttttaaatataaaatattttttatagttatttgtttttttggaagaattttgttatgagaaagaaattttggagaagtacggatatttagattgttgtagttaaagtgaagagggaagatataattgtttttttgtatataaaaagtttattttagtatcgattttatttttttaagttttagaatttgttataagttgtgaagtatatgaagaagatagggagatatttatgaataagtaaggatttagtttaaaggtagatgtaaattttagaaatatagtaatggtaagtttaatttagtatttttgtaatgtatttatgtatttttagtaagaggtataatgtttttttggtgttgtgtttgttgaggttttaggtaaggtaattaggagagtaatatttaatgtaatttggtttttatagtacgttagatgtagtataaattataggataaatttattagaggttttattagttttttgagagatatatattttttttttttttttttatttattttatttttaattttattttgtttaagaatatattagtattgtattaaattgatgttttttagagttatatattggtgttttgtgtttatttaattgtttagaaataaaagttagagatttaagtatggttaagtatggttaagatatatagatatggtaaaggtttattgaatatttaggatgttgtggggtcgggcgcggtggtttacgtttgtaattttagtattttgggaggtcgaggcgggcggattacgaggttaggagatcgagattattttggttaatatggtgaaatttcgtttttattaaaaatataaaaaaaattagtcgggcgtgatggtgggcgtttgtagttttagttattcgggaggttgaggtaggagaatggcgtgaattttggaggcggagtttgtagtgagtcgagattgcgttattgtattttcgtttgggttatagagcgagatttcgttttaaaaaaaaaaaaaaaaaaaaaggatgttgtggaaatatgtttgtttgtatagaggattagattaatatttataaataaattttgaagttttttttttttttttttttttatttttttttttttttttattttgttgataggaaattgaaggttggaaggttaaaataattggttaagggtatatagttagtatatttgattttaggtttttttgttggagaagtttgtacgtaattttttaattatttttgttttttatgttattttttaaattagataaatagagagattgtttttagaatatttttgttatggcgattatttaggtgtataattttattttgtattgataagggataaaatgtttatttttttgttgtatttagtagaagtttggttttgttgatttttgaaatatatttgagtaggtttattgaaaaagattttttaataagaattatggttagtatgtttgtttattttttttttataatagaatttggtattatttgttagata

SEQ ID NO: 2 - DNA, 7001 bp, Artificial Sequence
  chemically treated genomic DNA (Homo sapiens)
tatttgatagatggtattagattttattatgagaagaaaataggtagatatgttaattatgatttttattaaaaggttttttttaataagtttatttagatatgttttagggattagtaaagttagatttttgttaagtgtaatagaaagatggatattttattttttgttagtgtagaatggggttatgtatttggatagtcgttatagtagagatgttttaagggtaatttttttatttatttggtttaggaagtaatatggaaggtagaagtgattgaagagttacgtataggtttttttaatagaagaatttggggttaaatgtattagttgtgtgtttttagttagttgttttagttttttaatttttaattttttattaataaaatgggggaaagaagaagaatgaagaggaagaggagaaggaggttttaaagtttgtttgtgagtgttaatttgattttttgtgtaagtagatatgtttttataatattttttttttttttttttttttttgagacggagtttcgttttgtggtttaggcgggagtgtagtggcgtaatttcggtttattgtaagtttcgtttttagggtttacgttatttttttgttttagtttttcgagtagttgggattataggcgtttattattacgttcggttaattttttttgtatttttagtagagacggggttttattatgttagttaggatggtttcgattttttgatttcgtgattcgttcgtttcggttttttaaagtgttgggattataagcgtgagttatcgcgttcggttttataatattttaagtgtttagtaaatttttgttatgtttgtgtattttgattatgtttgattatgtttggatttttaatttttatttttaggtaattaggtgaatataaaatattaatatatggttttggaaagtattaatttggtgtaatattaatatatttttgaataaggtaaaattgagagtagaatgggtaaaaagaaaaaaaaaaggtgtatattttttaagggattaatggaatttttggtaggtttgttttgtggtttgtattatatttagcgtgttatggaaattaagttatattgaatgttgtttttttaattattttgtttgggattttagtagatataatattaaagaaatattatattttttattgggagtatatgagtatattgtaaaaatattaaattaggtttgttattgttgtgtttttgaggtttgtatttatttttaaattggatttttatttgtttatgaatgtttttttgttttttttatatgttttatagtttgtgataggttttggaatttggaaaagtgggatcgatgttggagtgggttttttgtgtgtaagaaaatagttatgttttttttttttattttggttgtagtagtttgaatgttcgtatttttttaaaattttttttttatggtaaagtttttttagaaaggtaggtagttataagaaatattttatgtttggagaaagataattaattttgttttaaaaatttataagatatatgaaatattttttaatgtttaaaattagaattatagattttgaaaaattttttatataaattttaatgtattttgttttagtttgatgaaatagatttttttgttgttttatggaaaatgagattttaatgtttaaataataaaaggaaaaaagttatgtaattttttgttttttttttttaattttgaattattttattttttttttttgtgttattaaaaatttggattaggatatataaatttttataaatatataaattatgttttatggatatagggagggaaatagtatatattggggtttgttagggagtggagtgtagggagggagagtattaggaaaaataggtaatgtacgttgggtttaatatttaggtaataggttggtaggtgtagtaaattattatgttacgtgtttatttatgtaatagatttgtttattttgttcgtgtatattagaattttaaatttaaatttaaataaaaaaagaaattgagtaaaataatatttttatgatttttattaaagatgtaatttttggaattgtaaatatatatgtatatattatggtatatatatatatatatatatatatatatatatatatagatatattatattttagatataaatgtttattttatatgttatttttataagataataaaaaattgtatattatttttaattataaataaaaatgattttgaaatgaaataattattttttaaaaaaatattttttttggttataattatatatttagttaaaatgttttaaaatgtatgtgtttttttttttgtgatttatttttattaaatttagatgatagtattaatattttatagaaagtatttgaggaatatatgtgttttatgtatttgagggaatttttatgtagtttttatagttgttatagtaatatttagagaattttggaaggtttacgtaagatttttaatttttaatttttatttaaaagatatatttttgaatttataagaataaattagcgatttgtaatattattttgaatttttaattggttgtaaagttgtaatagataatgtatttttgtttttttatatatattttgaaaagattattagaataagataaaaatagagatgtaaaatagaaatttttgttaatttataaattttaaagttggaaagaatttaaattatatttttaaaggagtattttttttatgatattttaggtatattgttttttagttatttaattaattttattataatagagtattttttgggtatgttgttttataattggagagttttaattattattaagtttgtttttatgttgagataaaataaataataaatattatttgttgagtttttataatgaaatatttttatattaagaaaagtatttagtgtttatttaaaatttagattgaattgggtattatgttttgttgttgtttgttaaatttggtaattttaacgatgtgttatgtattttatatttattatagttatagtgtaatgaagttattaagattgttaattttaagttagatggtttagtttaaattttggttttgttatttggtggtttttataagaaagttatttaaattttttgagttttagtttttttagttggaagattagtatttatttttaaggattattttaaatgtttaataaataaatataggtaagtaaagttgatattttgtttagaagttcgagttagtattttttgatttattggataattattttgatttattagtgttatttattttttatgttataaaatatttttattattaatatatatattatgttttttagaataatgttagttatattgtgtgtataataaaagttagttattattgttgttatattaatttttatgttaattatgaaatgggagttattattattttttattttatagataagaaaattgaagtttaaaaaagttaatatgtttatagttattaagataattttattttagaattttagtttattatatttatatggtttttttataataattatttattgtttttttttgttttttttagtaatttagaatgaatttaattttttttttatataatagttttttaaatatttaaatgtattttttattgttatttttgtattttttttttagtatgttaaatttttgttaaatattataatgtttttttaaaattatttatttatttggttttttaaatattttgaagattgtttatttttagtgggttttttaattgtagttaatgtattttttattattttgtttatttttttgtaagtggttttttgaataaattgggtaaaaaatatggtagttttgaaataaaaatacgtgtgaatttttaaggaatagatttgtagtaagtttattttttttaagtatagttttttatttgtttgttttgttttttatttatgttgtaatttgtttagatatttgatttgtaaaattatgtaaaattagtttttaggttatttgagaagaaattttagttttttttttgtttttttttgttataaatatatatatagatgttaaaggttaaaataagtggattttttataagagtggtttttttttttgtgattatttatttattgtaatgtatttataattgagggtatttatattttttatggttatttttaaatttaagtaaaaaaaaattggtaattagatagatttttaatagtgtttatttttagtatgattaaggtttaaaatttaagattatagtgtttatggattgatttaaagtaatttttatgtaggtttggatgtgtaaggagtaatagtaatatattattttaaattttttgttagaaatttttaaaatgtggaatggaaagatatttaagagattaatatattttttataaataatagtaaatagaatattttattatttatggtttgttgttaagatttaaatagtatatagaaaagaaaatattataatattattttgttggtattgatgagaaaaatttttgaattagtatatggttgttattgattagatattaatttttagtttttaaaatttgatttggtttgatttatgagattttaaggaattaaaaggttaatgtcgaagatattagttaatagtttaatttttttaatattaagttgatatttagtatgagtaattttttttgaaattgtttaaattgtttttgtgtttttaagagtttataggggtatttaattttatttaagtatttatttatttttgttttatatatttaaagtatatttatataagtaaaatttataggttagttaaatttatttttgtagtatattggtaagaatttaatatggaagttggaaggtaaaataaattttatgaaacgtgtttttaattgtaattaagaaagtaattattgttatatatgaatgtttgtgttttagttagaattgtatagttttagaattaaaagaatattagggataatttaagtattttaattttatatttgaggaaaagaaaattaggaaattaaggaatgaagttaataagtataatttatagtagatttattattaaaatttagattttgttttttagttgtttggtttttttttgtattgtagtgttgtaattgttttgaaagttaaatggttaaaaatatattttaggtatttttttgaatatagttgtattacggtttgttatttatattttagttataatattttttttttagattattaaataatgatttatttttttgtattaaaaataaagattttatttattttattagtttgagggagttatgtgaaggagtataattttggtttttttatatataaaattttatttatatttatatatatgtatatatatgtgtatatatataattttttaaagttaatatgtatattattgaagtgtaaaaattaatttaatatgaaatatataaattatttatttattaaatattgttataattttgtaaattttttgtaaagttataagttttttttttatttaaatatatttattagttaaatattttttttttatgtggaataataaatatgaataataaattaagataaattaatgtaaattttataatttaaaaaattttgatatagagaaaagataagaaaaatataaaatattttatttattttatatttatttttatgtagtgttttggatttagtaaaatttagtaggaaaattaaaaaaattgattttatttattttatggttgttagttattttgttattggtagtggtggaagtataatatggaaaattatgttgaaatttttttatattttttttaggtaatgtttgttaattagtaattttttgttggtatatttgttattttatggtatttttttaggttgaaaatgggatatttgttaataattaatagtatagcggttatttgtattttatgtttaaggatatagagttttttggggtagaaaaaaaaaatttgtaaatttattttattttgtaaatataataaatattttttttaaattatagaatatttaaagatatgatttgtttttaagttgtagaataattaattttttttaaattaagttaatgaagttataaagaaaagatagtagatttggtatgtaatttatttaaatatattaattttttaaaattattaaatgtttattatatgttaggtatataagatattgtttgattaatttagattttttattttgtaaatataataaatatttttaaagtataaaaaatttagagagatgatttgtttttaagttgtagaataataaatttattttaaattattattgtttgataattatgttgttattgtttagtttagaaatattttttatttaatatgtatgttaataaggtatattttaaagtatttagtatgcgatgtatggtttaatatagaaaatttagagtataagttttaataaattaagttttataataattttatttgtatatgtgtttttataaagtgggttaggtgtattatttatttagtaatttaagatgatgatgttaatattaaatgatggatgttaagagtggtttattttttattatttttgtttataagggttttcgattttggttatatattagaattattgggggaattttttgaatttttaatgtttagtttgtaatttagattagttaaattagaatttgtggagttgagatttaggtattagtattttttaaagttttataggtgttttattattttaaaggtaagattataaaattaaataatttatattaggaaataaattaatatggtatatttataaagtagggtgatatatagttattaaaataattttgtggaagaatatttaatgaaatggaaatatgtttataatatattgttaattgaaaaataggataaaataata

SEQ ID NO: 3 - DNA, 3953 bp, Artificial Sequence
  chemically treated genomic DNA (Homo sapiens)
agtaggagggtaggagagaattttgtatagttggttacggtgttttatttaagggtttaatttggggttttattataaaagttgtagtaaaattgttaaaaataggaattattgggggtgggggttttgttttttttgtttagttattattttttttttttaatttttattttggtttatattacgtgtttttagaagaaacgttttgagtaggggttggtatgagattgtttttttttttaggatttatttttttttatgattaggttggtgattttttttttagggtgttagtgttatttattgagtagatgtttggtaggtgtttgttatgtgttagatttagtaggggatagagttttttcgatatagatggattagtatgtttggatataaattgtgaaaggagttgttaatttttttgtgtaaaatttatttttgcggttatcgttaatatttttatatatgttagggtatttagggttaggatttggtaattttgtttaggagtagtcgttttggagatttttaagacgagggaaagaaatgggtggaaataggggtttatattgtgggtttcgtagttattaaatagtttaattcgtggttattgagtgttttgaataatgtttggttggattttgagtttgagtgtgttattaatttagtttgttattgtcgttgttgttgttatgtatttttttattagttttgtttagaaagattttttttttttttaaaatattagtaaagggggtttagattagtttaagttaaatattttgtaataaaatggagtagttattttggtgaataagtatatttagaaaaggaaattgtttgtttggtaagatgttgtttaatagtattttttattttgatgtttcgtagtttttgagttaggaaattgagaagtttttgattagattgtaaaggttgtaggtttcgtaagggtgtaaggttatttttaaagaattagaagttaggtttttcgatttttatttttgttagcgttaaatagtaatcgttgaaggatgtagggtagttgtgagttgtagtttttttataggtaaaaattataagggtaaaatttggtttttagttttatagggatattttaagttgtgaaagtgttttggttataaagaattgcgtaaatgttaaatattaggtttagttataataattattttagtaataaattaaagagaagggtgaaatattggtaagtattttggagtttaattagtaagtttttgagatttttttatgtgttgattgggataaattttattttttaaaagaaaagacgtttttttggttcgagatatttgtgagttgttttagtaggggattagttatttttttattttttaaagttatagatagttgggatggttaagtaggtagtttaggttgatggtttattaaggttatttttttgtttatatagttttatagatatttggggttattttagttttagaaaagatgttttatattttagtaattgtaagttaaggataagtagagagatgtgggattgttgtttttatgtttgttgtagaagttgaggttttagatttgataaagtaagtgtagtgggaataagggaatatattattagaaattgggattttagaaaatagaatagttattgtttattaagtgttaggtatttttttaatagttttgtatatatgtttaaagtttatgtttaaaacgatataaatttattattttatagttatggaggatagaagtttaaaatgggttatattgggttaaaattatggtggtagtagagttgtgtttttggaggttgtagggaaaaatattttgttttttttagtttttagggaagggttgtttatgttttttagtttatggtttttttttagtagttacgagtttgatttttattgttatttttatatttttttttttgattttgaggttattgttttttttttgtataattaaggatttttgtgatgataatgggtttatttggagaatttaggttaattattttatttttaggtttttaattatattagtaaaatttttttttgttatggaaggtagtaaagttataggttttagggatgaggttgtggatatttttggggagcgttattttgtttgttatatagtaatttttgttataatttagggcgatggtatattttattattatttttaattagaaattgatgtgtggggaggtgatgtattataatttatttagggttaggtagttggatttgaatttgtttgatttttagatttgaggttttttggttttagaattttttttgaagtgaaaggtatgaggtcgattattttttgatttggtaaatagagatgttagtttggtttttagtgttagggagttttttggagtgatggtatagggtatatttttgttttgtattttaagtttagagattgggttttaggtttagttttttttttaattttttgagagatgatagtttttgggtaaagtttttttgtgttttttagtttttttatttgtgagatggtggtatggggagaggttggagtgatgttatagttttttttagtttgtattataggttttaggatttaggttttattagtaatttgttgggggaggtttgggttttttaggagaaatttgataagatggtgttgtaaatattaacggatatatagtattttatatttataggttgttttaggggtttttaataattttgattatttttgttttattttgtagatagaaaatcgaggtttagagagattatataatttgtttacgatttttttttagtaagatggaggttaagtgaaatgagaaagtaggttttttgttattttttttgtttagaggttttttttttatattagggttttttaagggttgagatttagttatatttgtgcgtgattaaatataagtgtgaataatgtaaagggagacgtttttaatttaaggggttttaattttgtaatgtaattttgagattatgtttttttttgttaaagttttttttttttgaagtgatggttattgtagatggtgagggttttttggaggcggataatatttttatatgataaaattaaaagttggtagtttcgaattgatttttggagtgttttgaaatgtaagaggttttcgaaattttagtttgggagttacggagggtttttttttttttttaggtttattagtttgggaggtttggagagaggtttggaggatttgttggggattaaagaagagtattggtgggaggatagggcgggggaagggggaggggagtgaagtagtttttttggaatgttggtggtgggggaggtagtttttttggtggaggagttttagcgttttttttttttttttttttgttaatataatggataatggtaattgtttatatatttttatggaggggaaggggatgagtgtagggaatttcgattttattcgggagatttgtaagtttgtagatatttttttttcgtttttattgaatttttgatttttgttttgtagttttcgtagtttgttgtttgtttattttatttgtttagttttagggatagagttgatttttgaatttttaagttttatattgttaggattagtgagtagtaatagggtcggggttgggtttattagttttttagtttagattttggttgtagatataaataggttttgtaagagttggttgtttagagattgcgagaaggaggtgcgttttgttgtttgtttcggttattttggttttttagtttaaggtttaggttttgttttaggtcgggtttttgggtatttgaggttttttttcgttttgtgtttttttttttatttggttgtaatgagtgggggagtacggggtttttgtatgttgaaggtattttatttagttaggtttttttttttttttagg

SEQ ID NO: 4 - DNA, 3953 bp, Artificial Sequence
  chemically treated genomic DNA (Homo sapiens)
tttggaggagaagaagggtttggttgagtggggtgtttttagtatgtagaagtttcgtgtttttttatttattgtagttaggtgaggagaagggtatagagcgggagaagattttaggtatttagaggttcggtttggggtaaggtttgaattttgagttggggagttagagtgatcggggtaggtagtaggacgtatttttttttcgtagtttttaagtagttagtttttgtagggtttatttatgtttgtagttagggtttgggttgggaggttgataagtttagtttcggttttgttgttgtttattggttttggtaatgtggaatttaagagtttaaggattagttttgtttttggggttgggtaaatagagtgggtaaatagtaagttgcgggggttgtagggtaggggttaagggtttagtgggggcgggaggggagtgtttgtaggtttgtaggtttttcgggtggggtcggggttttttgtatttattttttttttttttatgggagtgtgtgggtagttgttattgtttattgtgttggtagaggaggggaggggagggacgttgggatttttttattaaggagattgttttttttattattagtattttagggagattattttattttttttttttttttttcgttttgtttttttattagtgtttttttttagtttttagtaggttttttaggtttttttttaagttttttaaattggtaaatttggggagaggggagagtttttcgtggtttttagattgaggtttcggagattttttgtattttaaaatattttagagattaattcggagttgttaatttttaattttgttatgtaaagatattgttcgtttttaaaaaatttttattatttatagtgattattattttaaaaaggaaaggttttaataaaaaagggtataattttagaattatattatagaattgaagttttttagattgaagacgtttttttttgtattgtttatatttatatttgattacgtataggtgtgattggattttagtttttgggaagttttggtgtggggagaagatttttgggtaaaggaagtggtaggagatttgtttttttattttatttggtttttattttgttggaggaagatcgtgggtaagttatataatttttttgagtttcggttttttatttgtaaaatggggtaagaatggttagggttgttggaggtttttgagatagtttgtgaatgtaaagtgttgtgtgttcgttggtgtttgtagtattattttgttaggttttttttggaaggtttagattttttttagtaggttattgataggatttgagttttagagtttgtgatgtaggttgagaggaattgtgatattattttagtttttttttatgttattattttatagatgaagagattgaagagtatagagggattttgtttagaggttgttattttttagggagttagaagaaaggttggatttagaatttagtttttggatttgggatgtagggtagaaatgtattttgtattattattttaggaaattttttaatattagaaattaggttgatatttttgtttattagattagggagtggtcggttttatgttttttattttagagaagattttggagttagaaaattttaaatttaagggttaggtaggtttaaatttagttgtttgattttggatgagttatgatatattatttttttatatattagtttttgattgaagataatgatagaatatgttatcgttttgagttatggtaggggttattgtgtggtaagtagaataacgttttttaaagatgtttatagttttatttttggaatttgtggttttgttattttttatggtaaaaaaagattttgttagtgtgattaaggatttggagatggggtggttggtttggattttttaggtgggtttattgttattataggggtttttaattatataagagggaggtagtggttttagagttagagaaagagatgtgaggatggtagtggagattagattcgtgattgttggaagggggttatgagttgagggatatgagtaatttttttttagaagttggagaaggtaaagtatttttttttgtagtttttaggagtatagttttgttgttattatgattttagtttagtatgatttattttggatttttgttttttataattgtaagataataaatttgtatcgttttaagtatgaattttgaatatatatgtaaaattgttagaaaggtatttagtatttagtaaatagtaattattttgttttttagaattttagtttttggtaatgtatttttttatttttattatatttgttttattagatttgagattttagtttttgtagtaggtatgaaggtagtagttttatatttttttgtttgtttttgatttgtagttgttgagatatggaatattttttttaggattgaagtggttttagatgtttatgggattgtgtagatagggaggtggttttggtgagttattagtttgggttgtttatttgattattttagttgtttgtagttttagaaagtgggaaggtggttggttttttgttgggatagtttataggtgtttcgggttaagagagcgtttttttttttggggggtagagtttgttttagttagtatatgggggaattttagaagtttattggttggattttaagatatttgttagtgttttatttttttttttggtttgttattaaaatgattgttatggttaaatttagtatttaatatttgcgtagttttttgtggttaaagtatttttataatttagaatatttttataaggttggaggttagattttatttttgtgatttttgtttgtgggaaaattgtagtttatagttgttttgtattttttagcggttattatttagcgttggtaggggtgggaatcgggaggtttggtttttagttttttgagggtggttttgtatttttgcggagtttgtagtttttgtagtttgattagggattttttagttttttggtttagggattgcgaggtattaggatagggggtgttgttgaatagtattttattaagtaggtagtttttttttttaaatatatttatttattagggtggttattttattttattgtaaggtatttggtttaaattagtttaagttttttttattaatattttggaaaggaaggaggtttttttggatagagttgatggaaaaatatataataataataacgataataataaattgggttgatgatatatttagatttagggtttagttaggtattgtttaaggtatttagtggttacgggttggattgtttggtggttgcggggtttatagtgtaggtttttgtttttatttatttttttttttcgttttgggagtttttagagcgattgtttttgaatagggttattaagttttggttttggatgttttgatatgtgtaggagtgttggcggtgatcgtaagagtggattttgtatagaaagattagtaattttttttataatttatgtttaaatatattggtttatttgtatcgggaggattttgttttttgttaggtttggtatataatagatatttgttaaatatttgtttagtgaatggtattggtattttagagggagggttattagtttggttatagggaggagtgggttttgggaggggaggtagttttatattagtttttgtttagaacgttttttttgggagtacgtggtatgagttagaatgagagttagggaggggaggtggtgattgagtaggggagataggatttttatttttagtagtttttatttttggtaattttgttgtagtttttgtgatagagttttaagttagatttttgggtggggtatcgtagttagttatgtaagatttttttttgtttttttgtt

SEQ ID NO: 5 - DNA, 7432 bp, Artificial Sequence
  chemically treated genomic DNA (Homo sapiens)
atttgaagttagagttatttagaggagaaagagttggaattgagaatttaaggaatgtttggaagtgatcgggttcgagtttatttaggaagaaatagaggttggagatatgagattgtgttgttatttttttttattaatttttgggttttattgaggttttattataagtttggttttgtagtttagtgattaggagaaattagatataagataataataatagtaatgattttttttttttttttgagacggagttttgttttttcgtttaggttggattgtagtggcgcgatttcggtttaatgtaagttttattttttaggtttacgttatttttttgttttagtttttcgagtagttaggattataggcgtttgttattacgtttggttaattttttatatttttagtagagatggggttttatcgtgttagttaagatggttttaattttttgatttcgtgattcgtttgtttcggttttttaaagtgttggggttataggtatgagttatcgcgtttggttaatagtaatgatttttgagtatttatattgttagtttttacggtaagagttttttttattttttgttttgttttgttttaagatagagttttgttttgttatttaggttggagtgtagtggtgtgatcgcggtttattgtagtttttatttttcgggtttaagttatttttttgttttagttttttaagtagttgggattataggtacgtattattatttttggttaatttttgtatttttagtagggatagggttttttattatgttggttaggttggttttaaatttttggttttatatgatttgtttatttcggttttttaaagtgttgggattataggcgtgagttattgcgtttttttttgtatttgtttaagtaatatattgaaatatgtattgtgttttttattttatggaggaggaaattgaggttagtaaatgaggttgttatgggaggtggagataggatttgaatttgttttagtgtaggaggtttaagagtttttgtttttttttagggtattgtgtgggagggtgagaaggagggaggtttatagaggtatgatttttgattgttattgttatttgggttttgttttttgaagtttttgttaagcggggaggtggtcgggggagggttttgttttgtgtagttttttttttttcggttcgtagagttgagtatagagggatagaggtacggaatttttagaaatgtttttttttagaaataggttttaggttttgtttgttttgtgtttttgcgtgttggttttggtttgtattgggggtgagaagaagtgggtggagggatgtggggtttatatttggtgggtgtgagtgtggttgtgtgttttgtggttttgtagttacgtgagatatgagtacggagtgtgtgcgttttatggcgtgcgtatgtatgtgcgtgtcggggagtgtgtgtgtcggtggttgagagtgaagtgtgaatgttatattggtataaattgggattatttgtgtgtgtgtacgtgcgtgcgtggaagtgggagtatgtagtcgtggtaaaaaagtgtatgtttgtgtgtatatgtgtatttgtgtgtatttgtttttttgtggggtatgtgtgtgtaaaatatttgagtgtgtggatatgtgtgagggggtgagtgtgtgttggtgtgtacgtttgtgttttgtatatgtatttttttttttttttttgagacggagttttattttgttatttaggttggagtgtagtggtagtagtggtgcgattttggtttattgtattattcgtttattcgttttaagggatttttttgttttagtttttagagtatttgggattatagatatacgttattatgtttggttattttttttttttgagacggagtttcgttttgttatttaggttggagtgtagtggcgtgattttggtttattgtaacgttcgtttttcgggtttacgttatttttttgttttagtttttcgagtagttgggattataggagtttattattacgtttggttaattttttgtatttttattagagacggggtttcgtcgtgttagttaggatggtttttatattttgatttcgtgattcgtttgtttcggttttttaaagtgttaggattataggcgtgagttattgcgtttggttaatgtttggttaatttttttatatttttggtagagatagggttttgttatgttgtttaggttggttttgaaattttgattttaggtgattcgttcgttttggttttttaaagtgttgggattataggtatgagttattacgttcggttatgtattttatgttaaaatgggattatattttagattagtattatttagtagaaatttaaatttttaatatagggttaggtacggtggtttatgtttgtaattttagtattttcggaggtcgaggcgggtggatcgtaaggttaggagatttgagattattttggttaatagatgggtaaaaatttatttttattaaaaatataaaaaattagttatgtatggtggtatgcgtttgtagttttagttattcgggaggttgaggtcggagaattatttgaattcgggaggtagaggttgtagtgagtcgagatcgcgttattgtattttaatttgggtgatagagcgagatttcgtttgaaaaaaaaaaaaaatttaatacgtatgtagataatgtgtaaggtattattttatgtgtatcgtatgtagtaatttttaatttttacgataattttgaggtagatattattatttcgttttataaaaggagaaatagttttggggagataggataagttatcggttaaggtatatagttagttatatgtggttttcgcgtgacggttggtttttgtaggcgaggttttgtttagatgcgtgggtagaaggtttggttcggaaagaggaattgatagtaaggttaagttaatgtttgtttttgggggtagaaagttattttttgttttttttttattgtttatagaggtagtttagatagggtgggggttataggagaacgaagggagaagggggtagtttttgggtagtaaaattaggtggtgaagggaggtattagaggatggtaattagagaggttattagaggggaattataggtagatagggtgataggagggattattgatataaggtgaagagatggtttagtcggacggggtggtttatatttgtaattttagtattttgggagttcgaggtgggtggattatttgaggttaggagttcgaggttttaatatggtaaaattttattttttttaaaaatataaaaattagtcgggtatgatggtagatgtttgtaatttttgttattcgggaggttgaggtaggaaaattgtttgaatttaggaggtggaggttgtaatgagacgagattatgatattgtattttattttgggtaatagagtaagagattgattttgttttataaaaaaaaagaaaaaagaaaaaaaaaaagagatggttgatggttaaagaggggttagcggttaggggatatataagggtaaaggtaggaggtaagaggattggtagggggttgtttttgggttatcgggagcgatataggatgagtatggagggaaagggagaaggggattttagggttttagtttatttaagttgttttttggttttatttagtatgttagttagaggtttaggaaggaattttgagttttttattaaagttaaagatgagtcgttggagtttggtgaggggtaggatgaaggagttgttggagatagtggtgaataggattagagacgggtggtaatggttttggtgagggtgtgttgggttgggtggtgggaggggatttttgggtttgagggaggaggggttggggtttggatttttgagttttagggaggaggaaagggtgggagtggggttgtgatttttaggtttgggaggagtggagggttagagttgagagtaggaatttttaggttatagagaggagcggataaatggggtagagaatatttggggagagttggggtttttattgtgatgtttttttttttgtaggagttcgagtatttttcggggttttatgtagatttattatgacgattatttgagggatttgggttcgtttattaaggtttggtttttcgaatttaaagatagttttttgaagaagatttatagtttgtgttttaggtttgtttgtggggataaggattagggttaaaatgtttataaaagttaggtgtggttgtggcgggtgtttgtagttttagttatttaggaggttgaggtaggatgatggtttgagtttaggagttcgagattagtttgggtaatatagcgagattttttgggggtaaaataaaaagaaaaaaaaaagtttatatttttttaataaataaagttttatttgtgtttttgtttggatttttttttagtgtggttagaaaaaaatttattttattgttttttaggaattaatgagtagaagaggtgatatttgatggggaaggaagagtagggaggtcgggaagggtattaaggaataatattttattgtgggtttgcggagaatgggggattttaaggcgtgttagttttaggagggtgagggtaggagcgtgggtggagttagtaggtttttatgatggtttttattgagagtttcgtttttgttttttataagttttgattttatttttagtgggtatttagtatttttaatttttttatagtttttaatttagtttttgtcggaggcgaatttttagagtgagggttttttgttatttgagagaaggttttttgtgacgtgattttgggggacgttattgttttttttgtttttatttatttttttcgtagttttgttggttaggattttggtttagataaaggatgggggttgtggttgtggagcggaagtgggttttaattattataaattttttttgtgttcgttcggagttggtgaggatagtttgttagagtttggtaagaaagggatttagggtgcggggataggggggcgttagtagggagagggtaaagatcgataaagtaggaattttaagaggtataatattagaagttcgtgttggaattatgattgtgtgtgtgtgtgtgtgtgtgtgtgtgtgtgtgtgtgtgtgtgagagagagagagagggagatggagtttcgttatgtagtttaggttagatttaaatttttgggtttaagtaatttttttgttttagtttttttagtagttgggattataggtgtattattatattttataaattatagaatttagaattgtagattatttgagtttttgtttagagttagggtggttgaggtggggaggattttttgagtttaggagtttgaggatgtagtgagttgtgattttgttatcgtgttttagtttgggtgatagagaaattttatttttaaaaaagagaaagaaaaagggataggtataatggtttatgtttgtaattttagtattttgggaggtcgaggcgggtggattatttgaggttaggagttcgatattagttttattagtatggtgaaatcgtatttatattaaaaatataaaaattggtcgggtgtggtagtatatgtttgtaattttagttattttagaggttgagataggagaattgtttgaatttaggaagcggaggttgtagtgagtttagatcgtgttattgtattttagtttgggtgatagagtaagatttagttttggcggaaaaaaagaatgaaaaaatttaaaaaattaaaaaagaattgtaggttgggcgtggtggtttatatttgtaatttaaacgttttgggaggttaaggtaaacggattatttgatgttaggagttggagattagtttggttaatatggtgaaatttcgtttttattaaaaatataaaaattagataggtatggtggtgtatgtttgtatttttagttatttaggaggttgaggtaggagaatcgttcgaattcggaagatagaggttgcggtgagttaaaattgcgttatcgtattttagtttgggcgagagaataagattttgttttggaaaaaaaaaaagaattgtagattatttgtttgtgtttttttttcggggattagattttattttttttttgtcgtatttttttattttttacgtgtggatgatgatattgtgttttgtgtatgtttttcgttattaaaagtgttttttttatagagtaggtgagaatttagtgaggagatgtagggatatgaggtttgatttagggtagagttttaaggtaatatatttgatttattgtaggtttttaatggtgtttgtagagtatttttttgtattgatttagttttagtaaagggtagaggttttgttgtgttttttgttgggtttagaattgtttaggtgtttaagaaagttttttaggttgggtttagtggtttatatttgtatttttagtattttggggaggtcgagatgggaggatcgtttgagtttaggagttttagattagtttgggtaataaaataagttttttatttttataaaagaataaaaattagtagttgggtatggtggtttatgtttgtaattttagtattttgggaggttaaggtaggtaaattatttgaggttaggagtttaagattagtttggttaatatggtgaaattttatttttattaaaaatataaaaattaggtggggtatagtggtttaagtttgtaattttagtattttgggaggttaaggtgggcggattacgaggttagaagttcgagattagtttggttagtatggtgaaattttatttttattaaaaatataaaatattagtcgggtatggtggtaggtgtttgtgattttagttttttgggaggttgaggtagaagaattgttagaattttggaggtagaggttgtagtgagtcgagaatacgttattgtattttagtttgggtgatagagcgagattttattttaaaaaatacgaaaataaaaattagtcgggtggtggcgggtgtttgtaattttagttattggggaggttgaggtaggagaattgtttgaatttgggaggtgggggttgtagtgagttaagattgtattattgtattttagtttgggtaatagagtgagattttattttaaaaaagaaaaaaataataattaaaatgttaaaattaggagtagaattatagaatgttggaaagtgaggtttaagaagggggttgtgtttaagtttatgtatgggaaatttgattgggatatcgagtttatatagagtaggattttagttttttttattagagtggggcgtgattataggaatagtcgtttttagttagtttgttatatgatatttttttaatgttttagg

SEQ ID NO: 6 - DNA, 7432 bp, Artificial Sequence
  chemically treated genomic DNA (Homo sapiens)
tttggaatattgagggggtgttatgtggtaggttgattggaggcggttgtttttgtggttacgttttattttggtgggggggattgagattttgttttgtgtgagttcggtgttttagttaagttttttatgtatggatttggatatagttttttttttgggttttattttttaatattttgtgattttatttttgattttaatattttaattattattttttttttttttgagatggaattttattttgttgtttaggttggagtgtagtggtgtaattttggtttattgtaatttttattttttaggtttaagtaatttttttgttttagtttttttagtagttgggattataggtattcgttattattcggttgatttttgttttcgtattttttgagatggagtttcgttttgttatttaggttggagtgtagtggcgtgttttcggtttattgtaatttttgtttttagggttttagtaatttttttgttttagttttttaaggagttggaattataagtatttgttattatgttcggttaatattttgtatttttagtagagatggggttttattatgttggttaggttggtttcgaatttttgatttcgtgattcgtttattttggttttttaaagtgttaggattataggtttgagttattgtgttttatttgatttttgtatttttagtagagatggggttttattatgttggttaggttggttttgaatttttaattttaagtgatttgtttgttttggttttttaaagtgttggaattataggtatgagttattatgtttagttgttaatttttatttttttgtagagatgggagatttgttttgttgtttaggttggtttggaatttttgggtttaagcgatttttttatttcggtttttttagggtgttgggagtataggtgtgagttattgagtttagtttagaaggtttttttgagtatttaaatagttttgggtttagtagggaatatagtaaagtttttgttttttgttaaggttgagttagtgtagggaggtgttttgtagatattattaaggatttatagtagattaaatgtgttattttagggttttgttttaagttagattttatgtttttgtatttttttattgagtttttatttgttttatgagagaggtatttttggtgacgaagaatatgtatagggtataatattattatttatacgtaggagatgaggaagtacggtagaaagagggtgagatttgattttcggagaaagaatataagtaaatggtttataattttttttttttttttaagataaggttttgttttttcgtttaggttggagtgcgatggcgtaattttggtttatcgtaatttttgtttttcgggttcgagcgatttttttgttttagttttttgagtaattggaaatataagtatgtattattatgtttgtttaatttttgtatttttagtagagacggggttttattatgttggttaggttggtttttaatttttgatattaagtgattcgtttgttttggttttttaaagcgtttggattataagtgtaagttattacgtttagtttatagtttttttttagttttttaaatttttttatttttttttttcgttaagattgagttttgttttgttatttaggttagagtatagtggtacgatttgggtttattgtaattttcgttttttgggtttaagtaatttttttgttttagtttttggaatagttgggattataggtatatgttattatattcggttaatttttgtatttttagtatagatgcggttttattatgttggtaaggttggtgtcgaatttttgattttaagtgatttattcgtttcggttttttagagtgttgggattataggtatgagttattgtatttattttttttttttttttttttttagaaatggggtttttttgttatttaggttggaatacggtggtaagattatagtttattgtatttttaaatttttgggtttaagggattttttttattttagttattttaattttaagtagaagtttaaatagtttatagttttaaattttgtgatttgtggagtgtggtggtgtatttgtagttttagttattggggaggttgaggtaggaggattgtttgagtttaggagtttgagtttagtttgggttatatagcgagattttattttttttttttttttttttatatatatatatatatatatatatatatatatatatatatatagttatggttttaatacgggtttttaatattgtgttttttaaaatttttgttttatcgatttttgttttttttttgttgacgtttttttgttttcgtattttgagttttttttttattagattttggtaggttgtttttattagtttcggacgggtatagagaggatttatagtggttgagatttattttcgttttatagttataatttttattttttgtttaggttaaagttttggttaatagaattgcggagggggtgggtggggatagaaagggtaatgacgttttttaaggttacgttatagggaatttttttttaagtgatagggaatttttattttgagaattcgttttcgatagaggttgggttgggggttgtggaggggttggaggtgttgggtgtttattgggaatggagttagagtttgtaggagataagggcgaagtttttagtgagggttattatggggatttgttgattttatttacgtttttgtttttatttttttgaaattgatacgttttgaagttttttatttttcgtaagtttataatagggtgttattttttgatatttttttcgatttttttatttttttttttttattaggtgttattttttttatttattgatttttgggaggtagtggggtgggtttttttttggttatattggggaaggatttagatagggatataggtgagattttatttattggagaagtatgaatttttttttttttttttgttttatttttaagagatttcgttgtgttgtttaggttggtttcgaatttttgggtttaagttattattttattttagttttttgagtagttgggattataggtattcgttataattatatttggtttttatgaatattttaattttggtttttgtttttatagataagtttggggtataggttgtgggttttttttaagaggttgtttttggattcgaggaattaggttttggtgagcggatttaggttttttaggtggtcgttatagtaggtttgtatgaagtttcggaaggtgttcgggtttttataggagagaggatattatagtggaggttttagttttttttaggtgttttttgttttatttattcgtttttttttgtgatttaggagtttttgtttttagttttaattttttattttttttagatttaggggttatagttttatttttattttttttttttttttgagatttaggggtttaggttttagtttttttttttttagatttaggagtttttttttattatttagtttagtatatttttattagaattattgttattcgtttttggttttgtttattattgtttttagtagtttttttattttgttttttattaggttttagcgatttatttttagttttggtggggggtttagggtttttttttgggtttttggttggtatgttaggtggaattagagggtaatttgggtaggttgggattttagaatttttttttttttttttttttatgtttattttgtgtcgttttcggtggtttaggggtagttttttgttagtttttttgttttttgtttttatttttatgtgttttttgatcgttaatttttttttaattattagttattttttttttttttttttttttttttttttttatgagatagagttagttttttgttttgttgtttagggtggagtgtagtgttatgatttcgttttattgtaatttttattttttggatttaggtaatttttttgttttagtttttcgagtagtagggattataggtatttgttattatgttcggttaatttttgtatttttagaagagatggggttttgttatgttggggtttcgaatttttgattttaagtgatttatttatttcgggtttttaaaatgttgggattatagatgtgagttatttcgttcggttgggttatttttttattttgtgttagtagttttttttgttattttgtttgtttgtggtttttttttaatggtttttttaattgttattttttgatgtttttttttattatttgattttgttgtttaggaattattttttttttttttcgtttttttgtgatttttattttgtttgagttatttttgtggatagtggagggagagtaggaggtgattttttgtttttaggggtagatattggtttagttttgttgttagttttttttttcgggttagattttttatttacgtatttggataaagtttcgtttatagagattagtcgttacgcgggggttatatgtagttagttgtgtgttttggtcggtgatttattttgtttttttaggattgtttttttttttgtagaacggggtaataatatttattttagggttatcgtgagaattaagagttattatatacgatgtatatggaatggtgttttgtatattgtttatatacgtgttaaatttttttttttttttagacggagtttcgttttgttatttaggttggaatgtagtggcgcgatttcggtttattgtaatttttgtttttcgggtttaagtgatttttcggttttagtttttcgagtagttgggattataggcgtatgttattatgtatggttaattttttgtatttttagtagagatgggtttttatttatttgttagttaggatgattttaaattttttgattttgcgatttattcgtttcggttttcgaaagtgttgggattataggtatgagttatcgtgtttggttttgtattaaaaatttaaatttttattggataatgttgatttagaatatgattttattttaatataaagtatatggtcgggcgtggtggtttatgtttgtaattttagtattttgggaggttaaggcgggcggattatttgaggttaggattttaagattagtttgggtaatatggtaaaattttgtttttattaaaaatataaaaaaattagttaggtattggttaggcgtagtggtttacgtttataattttagtattttggaaggtcgaggtaggcggattacgaggttaggatatggagattattttggttaatacggcgaaatttcgtttttagtaaaaatataaaaaattagttaggcgtggtggtgggtttttgtagttttagttattcgggaggttgaggtaggagaatggcgtgaattcgggaggcggacgttgtagtgagttaagattacgttattgtattttagtttgggtaatagagcgagatttcgttttaaaaaaaaaaaatagttaggtatggtggcgtgtgtttgtagttttaaatattttgaagattgaggtaggagaattttttgaaacgggtaggcggatgatgtagtgagttaagatcgtattattgttattattgtattttagtttgggtgatagagtgagatttcgttttaaaaaaaaaaaaaaaaatgtatatgtaaaatatagacgtatatattagtatatatttatttttttatatatgtttatatatttaaatattttgtatatatatattttatagagagataggtgtatataaatatatatatgtatatagatatgtatttttttattacgattgtatatttttatttttacgtacgtacgtgtatatatatagatgattttagtttgtattaatgtgatatttatattttatttttagttatcgatatatatatttttcgatacgtatatgtatacgtacgttatgaaacgtatatatttcgtatttatgttttacgtggttatagagttataggatatatagttatatttatatttattaggtgtgggttttatatttttttatttatttttttttatttttaatgtaggttaggattagtacgtagaggtatagggtaggtagggtttggagtttgtttttgaggagggatatttttgggggtttcgtgtttttgtttttttgtgtttaattttgcgggtcgggggaggggaggttgtatagagtagggttttttttcggttattttttcgtttggtagagattttagagagtagggtttaggtgatagtggtaattagaggttatgtttttgtgggttttttttttttttatttttttatatagtgttttgagagaagatagaggtttttgagttttttgtattgaggtaggtttaaattttgtttttattttttatgatagttttatttgttggttttagtttttttttttataaagtgggaggtatagtatatattttagtatattatttgaataaatataaagaaaggcgtagtggtttacgtttgtaattttagtattttgggaggtcgaggtgggtagattatatgaggttaggagtttgagattaatttggttaatatggtgaaaaattttgtttttattaaaaatataaaaattagttagaagtagtgatgcgtgtttgtaattttagttatttgggaggttgaggtaggagaatggtttgaattcgggaagtgaaggttgtagtgagtcgcgattatattattgtattttagtttgggtgatagagtaagattttgttttgaaataaaataaaataaaaaatgaagaaagtttttatcgtggagattggtaatataggtgtttaaagattattgttgttggttaggcgcggtggtttatgtttgtaattttaatattttgggaggtcgaggtaggcggattacgaggttaggagattgagattattttggttaatacggtgaaattttatttttattaaaaatatgaaaaattagttaggcgtggtggtaggcgtttgtagttttagttattcgggaggttgaggtaggagaatggcgtgaatttgggaggtggagtttgtattgagtcgagatcgcgttattgtagtttagtttgggcgaaagagtaagatttcgttttagaaaaaaaaaaaagattattgttgttattattattttgtgtttaattttttttagttattgggttgtagggttaggtttgtggtagggttttaatagggtttaagggttgatgagaggaaatagtaatatagttttatgtttttagtttttgtttttttttaggtgggttcgagttcgattatttttaagtattttttgagtttttaattttaatttttttttttttgggtgattttggttttagat

SEQ ID NO: 7 - DNA, 9884 bp, Artificial Sequence
  chemically treated genomic DNA (Homo sapiens)
tcgtttaggttggagtgtagagtgatatgattttggtttattgcgatttttaattttcgtttttaggtttaagtaatttttttgttttattttttttagtagttgggattataggtttgtgttagtatgtagggataatttttttatttttagtagaacggggggttttattacgttgattaggttggttttaaatttttgattttaagtgatttgtttgtttcggttttttaaagagttaggattataggtgtgagttaatatatttagtttaaaatgattttttttttaaaggaaatttattagtaagttaagtttatttattatttattttattttatttttagagatagggttttgttttttcgtttaagttggagtatagtggtgattatagtttattgtaattttgaatttttgggtttaagtaattttttcgttttagtttttttagtagttgggattataggcgtgtattattatatttagttaattttttgtattttttgtagaaagagggttttattatgttgtttaggttgtttttgaatttttggttttaagtgatgtttttatttgggttttttaaagtgttgggattataagtatgaggtattatatttagtttgttttgtttattttttttgttttaaatatatttttgttttggttggatgcggtgttttatatttatatttttagtattttgggaggtcgaggtaggtggattatttgaggttcggagtttaagattagtttgattaatatggtaaaattttatttttattaaaaatataaaaattagttaggtatggtggtacgtgtttgtaattttagttatttgggaggttgaggtaagagaattatttgaattttggaggtagagtttgtagtgagttgagattgagatattgttttttagtttgggcgatagattgagaatttattataaaaaataaaaaaaaataaaaattaaatatatttttgttttgtaattaaattttagataaattggtgtagttttttagtatggggtaaaaaaagttatttttatgttttttgtttatttttattattataaattttataaaatatttttgtaatttttttttttttttgagaggagttttgtgttgttgtttaggttggagtgtagttgagtaatttcggtttattgtaagtttcgtttttcgggtttacgttatttttttgttttagtttttcgagtagttgggattatacggggttcgttattatattcggttaattttttgtatttttagtagagatagtgttttattatgttagttaggatggtttcgattttttgatttcgtgattcgtttattttagttttttaacgtgttgggattataggtatgagttattatgttcggttttttttttttttttagatagaattttattgtgttgtttaagttggagtgtagtggttattgtaatttttattttttaggtttaagtgattttcgtgttttagttttttaaatagttgggattataggtatgtgttattatgtttagttaaagatggggtagggggtgtagggatttcgatatgttggttagatttattttgaatttttgattttaagtgattaatttgttttagttttttaaagtgttgggattataggtgtgagttattatgtcggttaattttgttgttattgttgttgttgttttgagatagttttatttttgtcgcgtatattgaagtgtagaggcgtaattttggtttattgtaatttttatttggtttattgtaatttttattttttggatttaagcgattttttttttttagttttttgagtagttggggttataggtgtgtattattatttttagttaatttttgattttttagtagagacggggttttgttatgttggttaggttggttttgaatttttgattttaggcgatttgtttgttttggttttttaatgtgttaggattatatgcgtgagttattatgttcggttttgttgtttttagaaacgatatttttttttgttagtttgtgaaagttgattgggttatttttgttatttttaattaaaatagtgttaagaggtaaagggaaaaaaaagtatttagggtatataatattgttttaaaaatgtaattatttgtaagtttggttgttgaaattgttcgttataatttaaattagtttttttgtttgtttgttttgagatggagttttattttgtcgtttaggttggaatgtaatggtatgattttggtttattgtaatttttgtttttaggtttatgtgatttttttgttttagttttttaagtagttgggattataggtattcgttaatatatttagttaatttttgtatttttagtagagacggggttttattatgttggttaggttggttttgaatttttgattttaggtgatttattcgtttcggttttttaaagcgttgggattataggcgtgagttatcgtgttcggttgatttaaattagttttatttaattagttgttaaaaataatttgtagtgattttaaggatcgttttatttagttgttattatttgttaattaaaatttgttagttttttaaaattttattagtgataatgaatttttttaaagaataatatataatagttttttttttttgttgtttgttttgatatagggttttgttttgttgtttaggttggagtgtttcggtgtgattatagtttattgtatttttaaatttttgggtttaagtgaattttttattttggttttttaacgtgttgggattataggtatgagttattgtttttggttatattttttttttataaaaataaaatttttaattatttgtttgtttttttgacgtattaaagattattttgtttgtgtgtatgttttgaatggtaattattgttttttaaatgttttaaatttatagatttgtttttgtattttattttatttggatagttttttttttttttttttttttttttttttttttttttttttttttttttttagatggagttttatttttattgtttaggttggaggatagtggtgtaatttggggtttattgtaatttttgtttttcgggttaaagtaatttttttgttttagtttttttagtagttgggattataggtgttcgtttttatgtcgggttaatttttgtatttttagtagagatggggttttgttatgttggttaagttggtttcgaatttttgattttaggtgatttattcgttttagttttttaaagtgttgggattataggcgtgagttattgcgtttggtttggatagtttttttgtatttttgatttttaggagaattgttgttttatttttttatggtttattttgaaaagagtaggatattagagaaaaggatggttaattacgtgtttataagttatgttttaggagatgatttttgtagttcggatatttatttgttttattaaaatttaggttttaggtgtaagttaggatttgggggatggaattgaaaatgtttttttaaacggtgaaaagcgggtttagcgtagaggttgaggaggaaggattatttgaagttaggagttcgagattagtttgggtaatatagagagatttttttttacgttttgtttattatcgtcgtttttataaaaaaattagttaggtatggtggtgggattataggggtataggttgaggttagaggattgttttagtttaggagttttaggttgtaatgaatggtgataaatttattgtatttttttttgggtaatagagtgagattttgttttaaataaaataaaataaataaataaaaaaaaaagaaaagtgaaggtaacgttaataagtgtttattatgatataataatattagtattatatatatatattaattttgtatatattattaaaattttagtatggtaattttgtggagaaaaaaaaaaagtttatttaggtaagtatagaaagtgtttttttattatttttttttgattttaaatgaagaagtagagtttttaatagtatgaattagatgttggtagaggaaaaagcgagttttcgttttattttggtgtaaatttttgattttggataatttttagtaggattggtaatgatttttttaggtttttttgtgattgttgatatattttttttaatttaaagtttcggaatatatgtttaggacgtgtaggtttgttatataggtaaatgtgtgttatggtggtttgttgtaattattattttattatttaggtattaagtttcgtatgtattagttatttattttgatgtttttttttttcggttattaggatttttaaatagtttgttttaatttattgataggatttttttagaatgaatttaaaaaagttgggaatttttaatttgagcgtagatcggattacgtggaacggtgttggtgtttgttaaaaatttagattgtttcgaattttcgatttagagggtttgaagtggggttaagatttgtagattaacgggtttcgtgggaggttttttgttggtggttagtttcggggtttagttgtttattgttgttattcgtgttaaattacggtttaatattatcgatattattaatcgttttggtttttaagatagtcgcgattttagacgggtgaggtttttattttttagtattagatggggtttgggaattgttgtttagtagatttagttatttacgtggttattcggggtaattataaggtcgatttaaaagattaaaataaatgtataacgaatgttaggattaaagtcggaatatatttaattatttattttgaggtttaaatttaaaaatgttatataaaaaaataagtaatttgttaaaaaatgtagagtggcggcgggggcggggggagaggtggtgaacgcgaggggtagtattttcgggttaggtgggtcggttgttttgattttttttgcggttcggttattttgttttagttagttcggaggttgcggttgtagaagtatcgtttgcggagtaattgtaaagatgttgttcgtgcgcgttgttgcggtcgtggttcgcgttttttttcggcgggtcggattggtgagtatcgaaggtcggtatgatgtaggcggtcgggtggggttgtagggtggtggtgcgtcggttcgggcgttttttgtaggagggcgaggggttgtggcgaatgtcgttattttgtattcgtggttttttcggttggatagagtaggcgatataggtgtttttttgttcgttatttgcgtagaggtagaatggtatagggtagatagttaattcgatggtgtttagagatagggttttaagatttttgttttcggttgatagcggttttagaagggggattttgggtgaaggttagggtttgggcgttagtttttcgaggtttgttttgaatcggtgaggtttttttttttcgatttttagggtcgcgtttcgttgaaggttagaaaattgttgttagtttttgttgaagttagttagtggagtttgatattgtgtgaaggttagtaggtttagtattttatttttgtttggagtttagtttagaggaaaggaataaatgaaggtggtttttggaatatttacgtaggtttttttttagtgttgaatacgaaacgatcgtgaaaacgttttgtaggtgtaaagaattattttatgtggttagtattgtgataatagtgaagttggtttttaaattgttttttcggtagagtgtgtgttttgtggtatttggacgtgtttaaagaatttgtttttgagttttttatttggttttgagtaatttttagtgatggagaatttaagtaaaagagaataaggttggaaaatggttgtaaggattaatatttttcgttatttgttttttttgaaattaatatgattttagtgtaaacgtattgatattgatattttttttttgttttaaaagtaattttaatttgaaaggtgaaataaatatgttggttgttttgttgttttaataatcgttggtagtattttgggtttttgttaataaaaaagtatttttaacggtttttatttagtttttatggaaggtagaggttttagaattgatagtgattagtcgtagtattataatttgaaggagaaattgaaggaagttttaggtggttgtaggatttgttgagagagtaaaataagtttatatgttttaatttttggtttttaatttaattttagtatttatttagtttttgtttgtttggtttttttttttttttttttttttgagatggtgtttcgtttagtcgtttaggttggattgtaatggcgtgattttcgtttattgtaattatcgttttttaggattaagtgatttttttattttagtttttcgagtagttgggattataggtattcgtcgttatgttttgttattttttgtagtttttcgtagagacggggttttattatgttggttaggttggttttgaatttttgacgttaggtgattcgttcgtttcggttttttgaagtgttgggattataagtatgagtcgtcgtgttcggtcgtttgttgtcgttgttgttgttgttgtttttaagtaaaattggaattattttgagttttgttttttgtaggaagttgtttattttagaatttttgtaattttattaaaatatatttaaagttaaaataataaaaattgggtattttaaagggaaagatatttatattttgttaatagtggggggggggggttttcggggttttaggttttttttttttttttttttcggggttttaaaaaggaatttttttttaaaaaaaaaaaaaaaaaaaaaaaaagaaagaaaaagaaagaagaaaaaaagaaaagaaaaaagaaattagagtagttggtgaaagtttatttattttttgtataaataggatttagtttggttgtaagtaatagaaaattttaaaataatagtggtttagataaggaagaggtttattttttttttatttataagtttttgattggttattttagggttggtatggttgtttttggggtgaggatttatatttttgtttgtttattttagtggtgtttggtttaatgtttggtatatgatagatttttagtaatatttattgaatgattgaaaaaattattaattaatagaaggatattgaaaaatttttgatatgtagaattaggatgattttttaaagagtgggtttatttttagtgtttttaatagtatgtgcggatgttagttttattttgttagttatagttattgtttttttttttgtttatttaataagtaaaatttggtgttttatttaatttttatttgcgtttttattattagggagagtgtatatttggttatttttttgtaattttttttttataaatggttttgtttttttttttatgttttgtttgtaaatttatatgtatattttaaaatatatatttttgtatatatatacgtgtgtgtgtgtgtgtgtgtgtgtgtaatttatatgttttaatatttagtataggtatgatatagtgagaggtagtttttaggtttttaagtttttgtattggatattttcgggtttgatttttagtttggttttttttaagttaaagaatgtgtgtgttcgtgtttaaattatttagttttttttagttttgtttttttatttgtaaaatgatatatgtatatggattttgaaaatattttatatagttaagtttattgatttaaagttttgtgattttttttattatatttcgaggttttttgtggtttaagttttatttaatatgtgttttatgattgggcgttgtggtttatgtttataattttagtattttgggaggtcgaggtgggataattgtttgagtttaggggtttaagattagtttgggtaatatattgagattttgtttttataaaaaaaattttaaaattagtaaggtatggtggttagtatttgtagttttagataattaggaggttgaggtagaaggattatttgagtttatgcggttgaagttgtagcgagtcgtgattatattattgtattgtaatttggatgatagagtaagacgttgttttattaaaaatattgttttttgagtatgagggtttaagtgttttgatatttgtagaagttagagatttgtgtggatttgtaaaatgaggaggaggtggatttttgtttttagggttttatattttttttaaggaagtaaataaagatgtaggatattaatgggaaatagattgatttatttttttttaggttaaaaagagtggtttatttgtcgggatggtggtttttgtttgtaattttagtattttgggaggttaaggtaggtggattacgaggttaggagattgagatttttttggttaatacggtgaaaatttcgtttttattataaagtagaaaaaaattagttcggtgtggtggtatgtgtttgtagttttagttatttaggaggagaattgtttgaatttgggaggtagaggttgtagtgagtcgagattgtattattgtattttagtttgggtgatagagcgagatttcgttttttaaaaaaaaaaaagtggtttattggggtaagtttttttttttttttttttttttttttttttttagtagagatggggttttattatgttggttaggttggtttttaatttttgattttatatgatttattcgttttggttttttaaagtgttgggattataggtatgagttatcgtgttttgttaatagttgttttttaaaatattgattgttaggtcgggtgtagtggttgacgtttgtaattttagtattttgggaggttaaggtgggtgtattatttgaagttaggagttcgagattaatttggttaatatggcgaaattttgtttttattaaaaataaaaaaattagtcgggtatggtggtggtcgtttgtagttttagttatttaggaggtcgaggtatgagaatcgtttgaatttgggaggtgaaggttgtaatgagttaagatcgtgtttttgtattttagtttgggtgatagaatgagatttcgttttagaaggaaaaaaaaaatgtgtgtgtatatatatatttattgtttagtaaatatatatttatttattgtttagtttgggtaatatgatgaaattttgtttttataaaaaaaataagtataaaaattagtttggttaggtggcgtatttttgtgattttatttattggggaggttgaggtgggaggattatttgagtttaggaagtcgaggttgtagtgagtcgtgattgagttattgtatttcgatttgggtgataagagtgagattttgttttaaaaaagaaaaaaaaataagtcgggtgcggtgtttacgtttatagttttagtattttgggaggttaaggcgggtggattatttgaggttaggagttcgagattagtttggttagtatggtgaaatttcgtttttattaaaaatataaaaaattaatttggtggaggtggcgtatttttgtagttttagttattcgggaggttgagaatcgtttgagattaggaggtggaggatgtagtgagtcgttttaaaaaaataataataataaagtatagattgtattttaaaaatatgcgagtgtttattgtgtattaggagttgtataaaaggtttttatatatattaaaagttatttttttatttgatattttaaataaaatgttttatatgtaattagtatttttattagtattttgattatattaagttggtatttgtttaagtttgtaagttttataaaggttttgttaaaaattaaatttttaagaatatttttgtattagg

SEQ ID NO: 8 - DNA, 9884 bp, Artificial Sequence
  chemically treated genomic DNA (Homo sapiens)
tttagtgtaaaagtatttttaaaaatttgatttttaataaagtttttataaaatttataagtttaaataaatgttagtttagtgtgattaaagtattggtgaaaatgttaattatatataaagtattttgtttaaaatgttaaatgggaaagtagtttttgatatatgtgaaaattttttatatagtttttagtatatagtaaatattcgtatatttttaaaatgtagtttgtattttattattattgtttttttgagacggtttattgtattttttattttttagttttaagcgatttttagtttttcgagtagttgggattataggggtgcgttatttttattaggttaattttttatatttttagtagagacggggttttattatgttggttaggttggtttcgaatttttgattttaagtgatttattcgttttggttttttaaagtgttagaattataggcgtgagtatcgtattcggtttattttttttttttttttgggatagggttttatttttgttatttaggtcggagtgtagtggtttaattacggtttattatagtttcgattttttgggtttaggtgatttttttattttagtttttttagtaggtgggattataggagtgcgttatttggttaggttaatttttgtatttattttttttatagagataggattttattatattgtttagattgggtagtaaataaatatatatttattgggtagtaaatatatatatatatatatattttttttttttttttgagacggagttttattttgttatttaagttggagtgtaggggtacgattttggtttattgtaatttttattttttaggtttaagcgatttttatgtttcggttttttgagtagttgggattataggcgattattattatgttcggttaatttttttatttttagtagagatagggtttcgttatgttggttaggttgatttcgaatttttgattttaggtgatgtatttattttggttttttaaagtgttggaattatagacgttagttattgtattcggtttggtagttagtattttaaaaagtaattattggtagggtacggtggtttatgtttgtaattttagtattttgggaggttaaggcgggtggattatgtgaggttaggagttggagattagtttggttaatatggtgaaattttatttttattaaaaagaaaaagaaaaagaaaaagaaaaagaaatttgttttagtaaattatttttttttttttgggaaacggagtttcgttttgttatttaggttggagtgtagtggtgtagtttcggtttattgtaatttttgttttttaggtttaagtaattttttttttgagtagttgggattataggtatatgttattatatcgggttaatttttttttattttatagtagagacggggtttttatcgtgttagttaggaaggttttaattttttgatttcgtgatttatttgttttggttttttaaagtgttgggattataggtaggagttattatttcggtaggtaaattattttttttagtttgaaggagagtaggttagtttgttttttattagtgttttatatttttgtttgtttttttaagaagaatgtaggattttgagggtaggaatttattttttttttattttgtaggtttatataggtttttgatttttgtaaatgttagaatatttaagtttttatatttaaaagatagtatttttagtgagatagcgttttgttttgttatttaggttgtagtgtagtggtgtaattacggttcgttgtagttttaatcgtatggatttaagtgatttttttgttttagttttttgattatttgggattgtaggtattggttattatgttttgttaattttaaaattttttttgtagagatagggttttaatatgttgtttaggttggttttgaatttttggatttaagtaattgttttatttcggttttttaaagtattaggattataggtatgagttatagcgtttaattataagatatatattgagtaaaatttggattatagaaaatttcgaagtgtaatagaagaaattataaaattttagattaataaatttgattgtataaagtgtttttaaaatttatatatatatattattttatagatgaggaggtaaagttgaggaaagttgaataatttgaatacgggtatatatattttttggtttgaaaggagttaaattgggaattaaattcgggaatgtttagtgtaaaagtttgagggtttgaggattgttttttattgtgttatgtttatattggatgttagaatatgtgaattatatatatatatatatatatatatacgtgtatatatataaaaatatatattttaaaatatgtatataaatttataagtaaagtatgaggaagaaaataaaattatttgtaaaagaggaattataagaaaataattaaatgtgtattttttttggtgataaaaacgtaaatgaaagttgaataaggtattaagttttgtttattgaatgagtagaaaaaaagataatagttatgattgatagagtgaaattagtattcgtatatattattgggaatattgagaataggtttattttttaggaaattattttggttttatatattaaaagttttttaatgtttttttgttagttaatggtttttttagttatttagtaggtattattgagaatttgttatgtgttaggtattgaattaggtattattggagtaagtagataggagtgtgggtttttattttaagggtagttatgttagttttggaatgattaattaggggtttgtagatgagagagaaataaattttttttttgtttaggttattgttgttttggggttttttattatttgtagttaaattgaattttatttatatagaaggtaagtgagtttttattagttgttttggttttttttttttttttttttttttttttttttttttttttttttttttttttttttttttttttttgaaaaaaaatttttttttggggtttcggggggggggggggggggggatttggggtttcgggaattttttttttttattgttaataaaatgtaagtgtttttttttttaaggtatttaatttttattattttgattttagatgtattttaatggagttgtaggaattttaagataaatagttttttataaggggtaaaatttaaagtagttttaattttatttaaaaataataataataataacgataataagcggtcgggtacgacggtttatgtttgtaattttagtattttagaaggtcgaggcgagcggattatttgacgttaggagtttaagattagtttagttaatatggtgaaatttcgtttttacgaaaaattataaaaagtagtagggtatgacggcgggtgtttgtaattttagttattcgggaggttgaggtgggagaattatttgattttgggaggcggtggttgtagtgggcggagattacgttattgtaatttagtttgggcgattgagcgagatattattttaaaaaaaaaaaaaaaaaaaaaaattaggtaaataaaaattgaataaatgttagagttagattagaaattaagagttggggtatgtggatttattttatttttttaataaattttgtagttatttggaattttttttagttttttttttaagttgtaatattgcgattggttattgttaattttgaagtttttattttttataggagttagatgaaaatcgttaaaaatgtttttttgttaatagaaatttaagatgttattagcggttgttaaggtagtaaaatagttaatatgtttattttattttttaaattgagattatttttagaataaaaaaaaagtgttagtgttaatgcgtttatattgaaattatgttaattttaagggaaataaataacgaagggtattaatttttatagttattttttaattttgtttttttttatttgaattttttattattaaaaattatttaaaattaggtggaaaatttaaggataaattttttaaatacgtttaagtgttataaagtatatattttgtcggagagataatttagaaattagttttattgttgttatagtgttggttatatgaaatggttttttgtatttgtaggacgtttttacggtcgtttcgtatttagtattaagagaaagtttacgtaagtattttaaaaattatttttatttattttttttttttaaattgagttttaggtagaggtgaaatgttgggtttgttgatttttatataatgttagattttattgattagttttaataagagttgatagtagttttttgatttttagcgggacgcgattttaagaatcgaaagagaggaattttatcgatttagaataggtttcggagagttagcgtttaagttttgatttttatttaagattttttttttagggtcgttgttagtcgaagataggaattttgaggttttgtttttggatattatcgagttaattgtttgttttgtattattttgtttttgcgtaggtgacgagtaaaagggtatttgtgtcgtttgttttgtttagtcggagaagttacgggtgtaagatggcggtattcgttatagtttttcgtttttttgtagagagcgttcgagtcggcgtattattattttgtagttttattcggtcgtttgtattatgtcggttttcggtgtttattagttcggttcgtcgaggaagggcgcggattacggtcgtagtaacgcgtacggatagtatttttgtagttatttcgtaggcggtatttttgtagtcgtagttttcggattgattgggataaaatggtcgagtcgtaaagaaggttaagatagtcggtttatttgattcggaagtattgtttttcgcgtttattattttttttttcgttttcgtcgttattttgtattttttggtaggttatttatttttttatgtaatatttttaagtttaaattttaaaatgaatgattagatatatttcggttttggttttggtattcgttatatatttattttggttttttgagtcgattttgtggttgtttcgggtgattacgtgggtagttgaatttgttaagtagtagtttttaggttttatttggtgttagaggatgagggttttattcgtttggggtcgcggttgttttgaggattagggcgattaatagtgtcggtagtgttagatcgtggtttagtacgagtagtaatagtgaatagttaaatttcgggattggttattagtagggagttttttacggagttcgttaatttgtagattttagttttattttagattttttgagtcgaaaattcggggtaatttgaatttttaataaatattagtatcgttttacgtgattcgatttgcgtttaggttaaagatttttagtttttttagatttattttaaaagaattttgttagtgaattagagtaaattgtttaaaaattttgataatcgggggaggggagtattaagataaatagttaatatatgcggagtttaatatttaggtgatgggatgatagttatagtaaattattatggtatatatttatttgtgtaataaatttgtacgttttggatatgtatttcggaattttaaattaaaaaaaatatattaataattataaggaggtttagaagagttattgttaattttattgagaattgtttagaattagaagtttatattaggataggacgaggattcgtttttttttttgttaatatttagtttatgttattgggaattttgtttttttatttggagttaaagggagatgatgaaaaaatattttttatgtttatttggatgggttttttttttttttttatagaattattatattgagattttggtgatatatgtaagattggtgtgtgtgtgtgatgttggtattattatgttatagtggatatttattaacgttgtttttattttttttttttttttatttatttattttattttatttaagatagggttttattttgttgtttaggaaagagtgtagtgggtttattattatttattgtagtttggaatttttgggttggagtaattttttgattttagtttgtgtttttgtggttttattattatgtttggttaatttttttgtaaagacggcggtggtgggtagggcgtggggggaggtttttttatgttgtttaggttggtttcgaatttttggttttaagtgattttttttttttagtttttgcgttgggttcgttttttatcgtttggagaagtatttttagttttattttttaaattttggtttatatttagaatttgaattttggtgaggtaaataaatattcgggttataagggttattttttgaaatatggtttgtaaatacgtgattagttatttttttttttagtattttattttttttaaggtaagttatgggaaaatagagtagtagtttttttgggaattaggggtataaaaaggttgtttaagttaggcgtagtggtttacgtttgtaattttagtattttgggaggttgaggcgggtggattatttgaggttaggagttcgagattagtttggttaatatggtaaaattttatttttattaaaaatataaaaattagttcggtatgggggcgggtatttgtaattttagttattggggaggttgaggtaggagaattgttttaattcgggaggtagaagttgtagtgagttttagattgtattattgttttttagtttgggtaataaaagtgaaattttatttaaaaaaaaaaaaaaaaaaaaagaaagaaaaaaagaaaagaaaaagaaaaaggttgtttaagtaaaataaaatatagagataaatttataaatttaaaatatttgggaagtaataattgttatttagggtatatatataaatagggtggtttttggtacgttagaagaataaatagatggttagaggttttatttttgtaaaagagaaatatagttaggaatagtggtttatgtttgtaattttaatacgttgggaagttaagatgagaggtttatttgagtttaggagtttgggagtgtagtgagttgtgattatatcggaatattttagtttgggtaataaagtaagattttatattaaaataaataataaaaaaagagaattgttgtatattgttttttaagaaagtttattgttattagtaaggttttggggagttggtaagttttgattggtaagtaatggtaattaggtaaaacgatttttagagttattgtaggttgtttttagtagttaattagataaaattggtttaggttagtcgggtacggtggtttacgtttgtaattttagcgttttgggaggtcgaggcgggtggattatttgaggttaggagtttaagattagtttgattaatatgatgaaatttcgtttttgttaaaaatataaaaattggttgggtatgttggcgggtgtttgtaattttagttatttgggaggttgaggtaggagaattatatgaatttggaggtagaggttgtagtgagttaaaattatgttattgtattttagtttgggcgatagagtgagattttattttaaaataaataaataaaaaaattggtttaggttatagcgggtagttttagtagttaggtttatagataattatatttttggagtaatgttatgtgttttgagtgtttttttttttttttattttttgatattgttttagttggggatgataagaatgatttaattaatttttataagttaataggaaaaaatatcgtttttaaaaataataaggtcgggtatggtggtttacgtatgtaattttagtatattgggaggttaaggtaggtagatcgtttgaggttaggagtttaagattagtttggttaatatggtaaaatttcgtttttattaaaaaattaaaaattagttgggggtggtggtgtatatttgtaattttagttatttaggaggttgaggaaggagaatcgtttgaatttaggaggtgaaggttgtagtgagttaggtggaggttgtagtgagttaagattgcgtttttgtattttagtatgcgcgataggagtgagattattttaaaataataataataataataataaaattagtcggtatggtggtttatatttgtaattttagtattttgggaggttgaagtaggttgattatttgaagttaggagtttaagatgagtttggttaatatatcgagatttttgtattttttgttttatttttagttgggtatggtggtatatgtttgtaattttagttatttaggaggttgaggtacgagaattatttaaatttgggagatggaggttgtagtgattattgtattttagtttgggtaatatagtgagattttgtttgaaaaaaaaaaaaaggtcgggtatggtggtttatgtttgtaattttagtacgttgggaggttgaggtgggcggattacgaggttaggagatcgagattattttggttaatatggtgaaatattgtttttattaaaagtataaaaaattagtcgggtgtggtggcgggtttcgtgtagttttagttattcgggaggttgaggtaggagaatggcgtgaattcgggaggcggagtttgtagtaagtcgagattgtttaattgtattttagtttaggtaatagtataagattttttttaaaaaaaaaaaaaaattgtagggatattttgtaaaatttgtagtgataaaagtggataaaagatataaagataattttttttgttttatattgaagggttgtattagtttatttgaaatttggttatagagtagagatatatttagtttttgtttttttttgttttttgtggtggatttttaatttgtcgtttaggttggagagtagtgttttaattttagtttattgtaaattttgtttttagggtttaagtgatttttttgttttagttttttaagtggttgggattataggtacgtgttattatgtttggttaatttttgtatttttagtagagatggggttttgttatgttggttaggttggttttgaatttcggattttaggtgatttatttgtttcggttttttaaagtgttgagaatataggtgtgaggtatcgtatttagttagagtagagatatgtttgaagtaaaaagaataagtaagataggttgggtgtggtgttttatgtttgtaattttagtattttgagaggtttaagtgggagtattatttggggttaggagtttaaaaatagtttgggtaatatagtgagattttttttttataaaaaatataaaaagttagttgggtgtggtggtgtacgtttatagttttagttattaaggaggttgaagcgggaggattgtttgagtttaggagtttaaggttgtagtgaattgtgattattattatattttagtttggacgaaagagtaagattttgtttttaaaaataaaataaaataaataataaataagtttggtttgttagtaagttttttttgaaaagaaaattattttaggttgggtgtgttggtttatatttgtaattttagttttttgagaggtcgaggtaggtagattatttgaggttaggagtttgagattagtttgattaacgtggtgaaatttttcgttttattaaaaataaaaaaattatttttgtatgttagtataagtttgtaattttagttattagagaggatgagataggagaattgtttgagtttggggacgggggttggaggtcgtagtgagttaagattatgttattttgtattttagtttaagcga

SEQ ID NO: 9 - DNA, 4001 bp, Artificial Sequence
  chemically treated genomic DNA (Homo sapiens)
tatggaaagtgtaaatagtgttcggtgtaaagtaggagttgtgataagtggatttttttttagaaatgggatttcgggttaggagtagtggtttacgtttgtaattttattattttgggaggttaaggtgggtggatcgtttgaggttaggagttcgagattagtttggttaatatggtgaaattttgtttttattaaaaatataaaaattaggtacgtgtgatggtgtatgtttgtaattttagttattcgggaggttgaggtaggagaatcgtttgaattcgggaggtgaaggttgtagtgagttgaaattttgttattgtatcgtagtttgggcgataagagtaaaattttatttgaaaaaaaaaaaaaggaaagaaagaaggaaagagaaggaaagaaagaaggaaagagaaaggaaggaaagaaagaaagaggaaaaaaggaaaggaaaaggaaaaagaaaagaaagaaaaggaaggaaagggagaaatgggatgtttgttaggtgtagcgttttggggaggcgtggagagtttataatagggattaaggtgttttttagtcgtagaatatggattatttgttaggtgtggttttggtatatttaggttattggttttgtcgatttgttaaatttaattatttgggtattttttcggttaatatagaggatgtttttatgtgaatacgtgtttatttgtgaaatgtttataatgttaaaggttcgttttggggtaaatatttgatagcgtttggtaaatttaataaatgttttttttgtaatgagtaagttttttaatgtttaaagaaatagttgaattcgttagtaatatgtcggatgttttttttatgtttgtatattttttcgttagtttttttttttttttttttttgagacggagtttcgtttttgttgtttaggttagagtgtaatggtgttatttcgttttatcgtaatttttatttttcgggtttaagcgagttttttgttttaacgttttgagtagttgggattataggtatgtgttattacgtttggttaattttgtatttttagtagagacggggtttttttatgttggttaggttggtttcgaattttcgattttaggtgattcgttcgtttcggttttttaaagtgttgggattatcggcgtgagttatcgcgttcggttcgttagttttaatatttatgttttttggagggtgaagggtttgaaaggtattaaaaattttggtttttaggagcgagttaaatttttttttttagagattgaaggaggttattcgatttcgtttttaggaaaatttaattcgtaatttttttttcgttttggtttttttaggttttattattcgcgtcggggagacgcggttcggtttacgttaggtcggtaagaatttattaggttttaggagggcggggtcgagttttagaagtcggggttcgggttaggagttttggtgtaggcggattcgggcgcgtgttatgggattataattttcggtacgtatcgcggattgcgtcgaatacggttggttgggagatttaattttattgtttttatcggttaatgggacggaggaaagaggtttgattcggattttcggaggttaatggtaatatagaggaggcgggtgtttttttattatttattttgcgtttagagaagttatatttaaaaggtcgtgtcgggtcgggttttcgtaggtagtgggattagagtcgggaggggcggcggtgtttcgggaaagcggtttttggggtattcgggttttttcgaggcgggtttcggacgtcgtcgtgggcggggtcgagggcggggtttggtttcgttgtggagcggttcgtaatttattatggcggtcgcggggtttggtgtttgtgtttgagtagcgttggagtcggagtcggttttcgggttttgcggttgaggagttttttcgttgtttacggtttttatcggcggggggcggttgggtttttcggcggagttcgggagatgtgattgtttgagggcggtggtggtgttagcgttcggggtcgggggagggggtgtttcgggtagagattttcgggtttggggtagttgaggcggtcgggttttttttatacggggttcgtttttcgttgtttgggtcgcgagagtttttcgttttttatagtttcgtttcggttttgggatattgcgggtggtttgttttttttagtttgggatatttcgttttttgaggcgtggaagagcgtcgtttcggagtaagttgttcgtgtcgcgtttcgatagttttttttagttttaagtcgttttttatttcggatttcggttttaattttggttacggagttttttatttaaattttttttttgttgttaaggggttttttttttttttaaggtggttttcgcgagtttttaatgttttgattttttttaatgttatttacggtttttttagttttagtttagttaaaaattttaatgtaaaggaaaagtttggattggttttataggttttttaaaaagcggatttaaaagttgttggtaatgtattttttttcgttagagtcgagggtaaattcgttgaaatttgggtgattcgtgttttttttcggagagtaaagtagagaagcgagagcggttattagttcggtaggaaatttgttggaagatgaagaagttaagatagggggttggtgatttttataggaaaagttttggaggagtagttaaagattattagcgttttttttatgtgtgagaattgaaatgattagtattattgattttttttagtattttttgtgaatatttttgtttaggtttttttttttgaaaagaaattgttatttagttcgtttaaaataaattaagaaatttttgggtaatattgtaattatatgaaattgataatcgcgaaaataattggaatttttgtttgtaagtgttaatttaaaaaaagtgtttttttttgttatggaagatgtttttttgtgattgattttaattgttgatttgtggagatgtagcgaatgtgaaattttacgtatatgttatttttttttacgttcgttgatcgttttggaagattttgaatttttttttggaaaggggtatttattattattttatggggtagtagtttggaaaagtatttggggattaaagaaggttaagtttgtttgttttgtattttattaaaggagtagggaagaaggaattatcgaggtatgggggtttatattgtaatgtttttgtggaatatggtgagtgttttttaaaatttttgtttatggttttttttatgtatttattttaggtttttaaggaattttgaataatagtatttgcgatagttttttttaattttatttaataaatttgttattgtagttattttttagtggaattttttttgtataagaaaaagttatttcgtgatttcggttttatttaaaatttatttgagttgtttattttttgtttgatttttttgttaatttattgttgattttggataagttattttattgttttagggttttagttttttgaggggttggattttagtggttttttagggtttttggttttatgattttgttttaatcgaagtcgtgggtttttttgataagtatggattttttattgttttgtttatagagagtttttattatatttttaaagtggtttgtgtttttgagaaagttaagaattatagatattggttgacgttaatatttttgattttttttttcgtaagtaggatttgaaaatatttattttggagttatgtgggaaaaattaagtggggaagtagtattttttgtgaattttagatagatagtttttgttttattttttataaggagtaatttttttttcgttgatgaagtttttattttgttttttttttgtttagaatgatatttgggttaataaaggttatttgtgatatttttatgaatatatttggtatttgaatgttgttcgtatatt

SEQ ID NO: 10 - DNA, 4001 bp, Artificial Sequence
  chemically treated genomic DNA (Homo sapiens)
aatgtacgggtagtatttaaatgttaaatatgtttataaaaatgttatagataatttttattggtttaaatattattttaaatagggagaagataggatgaaagttttattaacgaggaagagattattttttatggaaggtaagatagaagttgtttatttaaaatttataaggaatgttgtttttttatttgattttttttatatggttttaaagtgagtatttttaagttttatttacgaaggaaaaggttaaggatattagcgttaattagtatttatgatttttaatttttttaggaatataaattattttgagaatatgataaaagttttttgtagataaagtagtaaagaatttatgtttgttagaagagtttacgatttcggttagagtagaattatagaattagggattttaagaaattattgaagtttagttttttaggaaattaaagttttggaatagtaaagtggtttgtttaaggttaatagtgaattagtagaggaattaggtaagaaataagtaatttaaatagattttgaataaagtcgaagttacgaagtaatttttttttatataaagaaagttttattaagagataattatagtaataaatttattaagtggaattggaaggaattgtcgtaagtattgttgtttaaagttttttgaaggtttaagatgaatgtatgaggaaaattatgagtagaaattttgaaaagtatttattatgttttataaaaatattgtagtgtggatttttatgtttcgatgatttttttttttttgtttttttgataaaatgtagggtaggtaagtttggttttttttggtttttaagtatttttttaggttgttgttttataaagtaataataggtatttttttttagaagagggtttaagattttttagaacggttagcgagcgtagagggaaatggtatatacgtgggattttatattcgttgtatttttataagttagtaattgaagttaattatagaaagatattttttataataaaaggaagtattttttttaggttgatatttgtaagtaggagttttaattattttcgcggttattaattttatgtaattgtaatgttatttaaaagttttttgatttgttttaaacgggttgaataataatttttttttaagaagaaaaatttaaatagaaatatttataggggatgttgaaaagggttaataatgttagttattttaatttttatatataaaggaaacgttgatggtttttggttatttttttagaattttttttgtggaagttattaattttttattttagtttttttattttttaataaattttttgtcgaattagtggtcgttttcgtttttttgttttgtttttcggaaaaggatacgggttatttagattttagcgagtttgttttcgattttgacgaaaaggaatgtattgttagtaatttttaagttcgttttttaaaaggtttgtggaattaatttagattttttttttgtattaaagtttttggttgagttgagattaagggggtcgtaggtgatattggaagaagttagggtattagaggttcgcgggagttattttgggggaaggggagattttttgatagtaagggagggatttgaatgggaggtttcgtggttaaagttggggtcgggattcggaataaggggcggtttggggttgagggaagttgtcggggcgcggtacgggtagtttatttcggggcgacgtttttttacgttttagaaaacggggtgttttaagttgggggaaatagattattcgtagtgttttaaagtcggggcggggttgtaagggacgaaggattttcgcggtttagatagcggaaggcgggtttcgtgtagaggaggttcggtcgttttagttgttttaagttcgggggtttttgttcgagatattttttttttcggtttcggacgttgatattattatcgtttttaggtagttatatttttcgagtttcgtcgagggatttagtcgtttttcgtcggtaggggtcgtggatagcggaggggttttttagtcgtaggattcgggaatcggtttcggttttagcgttgtttaggtatagatattaaatttcgcggtcgttatgatggattacgagtcgttttataacgaggttaggtttcgttttcggtttcgtttacggcgacgttcggagttcgtttcgaggggattcggatgttttaagagtcgttttttcgggatatcgtcgtttttttcggttttggttttattgtttgcgaaagttcggttcggtacgattttttaaatgtggtttttttgagcgtaaggtgagtggtaaggaagtattcgttttttttgtattgttattggttttcgagaattcgggttaggtttttttttttcgttttattggtcggtgggagtagtagggttggattttttagttaatcgtgttcggcgtagttcgcggtgcgtgtcgggagttgtggttttatggtacgcgttcgagttcgtttgtattaagatttttggttcgggtttcgatttttggggttcggtttcgtttttttgggatttggtagatttttgtcggtttagcgtaggtcggatcgcgttttttcggcgcgagtagtgagatttggaagagttaaagcgagggaaaaattgcggattggatttttttggaagcggagtcggataattttttttagtttttaagggagaaaatttggttcgtttttagaaattaaggtttttgatgttttttaagttttttattttttaaaaagtataaatattagaattagcgggtcgggcgcggtggtttacgtcggtaattttagtattttgggaggtcgagacgggcggattatttgaggtcgggagttcgagattagtttgattaatatggagaaatttcgtttttattaaaaatataaaattagttaagcgtggtggtatatgtttgtaattttagttatttaggacgttgaggtaggagattcgtttgaattcgggaggtagaggttgcggtgaggcgagatggtattattgtattttagtttgggtaataagagcgaaatttcgttttaaaaagaaaaaaaaaaaaaaattagcgaagaaatatatagatatagggaaaatattcgatatgttgttaacgaatttaattgtttttttgggtattaggaggtttatttattatagaaaaggtatttgttgggtttgttaggcgttattagatgtttgttttagaacgaatttttaatattataaatattttataggtggatacgtgtttatatgaaaatattttttatattagtcgagaaaatgtttagatggttgggtttagtaagtcggtagaattaatgatttagatgtgttaaagttatatttaataaataatttatgttttgcgattaaaaagtattttggtttttattataggttttttacgtttttttagagcgttgtatttgataggtattttatttttttttttttttttttttttttttttttttttttttttttttttttttttttttttttttttttttttttttttttttttttttttttttttttttttttttttttttttttttttttttttttttttttttagatggagttttgtttttgtcgtttaggttgcgatgtagtaataggattttagtttattgtaatttttatttttcggatttaagcgatttttttgttttagtttttcgagtagttgggattataggtatatattattatacgtgtttaatttttgtatttttagtagagatagggttttattatgttggttaggttggtttcgaatttttgattttaagcgatttatttattttggttttttaaagtggtgggattataggcgtgagttattgtttttggttcgagattttatttttaaggagggatttatttattatagtttttattttatatcgagtattgtttatattttttata

SEQ ID NO: 11 - DNA, 5525 bp, Artificial Sequence
  chemically treated genomic DNA (Homo sapiens)
atttttttttatggtaattgggattagattgttttatttttcgatatttttgtaagatttttttatgaatattttgatatttttttgagtttggagaaaggcgttttttttgtgtatttagtttgataaattttttagttatagtttttattttggtatgtaaagttttgtatttattatattttgtattgacgttatttttataatttcggcgttgtttataggagatgatagtaatatattttattaaataatttgggagtttaattgttgaaggttttatggaggtagtgtaattttttttagtttttttattggaatttggattggagttatttagtttggtaattttttttttttttttaagatttttttttttttttttaatagttttaatgtcgtgtttttttatttggtttttttttttatgttttttagatttttttttggattttttgtgagatattgaatggtttttttttataggttttggatattttaatagaattgaattagggggtaaggtttttagagaagttttagaggtatatttgttttgttggtttttatagatattattgttttgattaaaattgttaataggtaggttttgagttttcggttttttggagtgttaggggaattggagttagaatttataatttgaggaggatgtgaaatcggtagatgggttgaaggtaagcggtggaggggtggggatggtagtagttgtagggggtagagggaggtttgtagtagattttttattggtgggatttaaatgattatttagtgttggtggtattttgttcgttaggtgagatattcgggtttttttatttattaaatgattaataaattttgaatttaaaagtcgtgtttgaggagaagatatagcgtttttattagaatatattggagattttgaacggttggtgtttgtagtattttgagatggatttagttttttagagagtattgattttaatgattaagtgtttattttattgtatttaggttagtttttttgaagttttttaaaaatataattttttgaagtatacgagaggtttttaggatttagattggttatttgttgtagaattgtttttagggagtttttgtttttttgattgatattatttttttggagtttagtaagtagtttcggttttttgtaggtttttagggttagtaagtgaattattttgtttttgtatggtttttgagagacgttgttgttgttgtgtgtttatcgaattggatttgtagggtttatgggggttgattttttttttttaggaattgtatttgaaatagtttgaggtgtttttcgaatttgtatttttttttttatatatggtttatcgggtttgataatttttgtgtttcggttgcgggattttttttttgtttgggtcgttttttttcgtgttatttgattcgagtcgtttgttgtatatattgtaattttattttgtataaattttaggtaattgagttgggaggttttagagttggagaatgtttgttggacgtagttaaagttgttttgagggttgtttttgtttatatttgataaataaaagttaaagttatgaattttattgaggggattatttttgggaattttgataagtttttggagtttttggaattgaattgaaggtcgaaaagaaattaaatttttgtggttttggtaagtttggagcgtttggatcgtcgattcggtgagttttatatgtagtacggtgatgttgttttgttttagtcgttcgtattagagtttatagcgttgtttcgcgatttttttattttcgatattttaaatttttagaggtgtcgtcgtcgttagtttagttttagtttttattgcggtcgtagttatttgggtttttgtagtcgtcgttattgttagggttatttcgttgttggcgtattgttatatattgcgcggagttagatttcggattgttatcgtcgttatttgttttattttttggtttcgcgtttcgttttaggttagttttattggtttagtttttttagaatcgtttttatcggtcgttttttatttttacgggggcggggtttaaagtcgttggagttttgtttttgggattggacgttcgagaggtaagagagttattataaggttttttaatttttatgttttttttagtggatttttaggttattgtggtttgtattattaggttatttataaaaatgaatatttttttaaattaggttattttatagtaaattacggtttttgattattattatgttttgaataaagattatgagtaattgtatttgaatgttgttgaattttattgattgaattttgaattgtttgattttgattaggttggtttgtggaaagtgttattaagaagagttttttagttcgttggtattatttttttgatagttattataaaagtttttttgatgtatttttttaagaattttaaatttttatatgtagttattttttgtatattaaatggtttttttatggttaggataataaaaatatgaagaaagtatataagattttaattaatttgacgttgtgaattgtgaattttgaattgaaattaagtaagttttttatgattaggttttaaggttttggttagttttttaaaattgagaggttgaaattttttgattaaaattaatatatttgttttttttttttagtttttggaaattattattttaattttgtttttataaaatagtaaattattttagagtttatatataagtgagattatgtagtatttatcgtgggtttattttaaggttttgagtaaattattatttttttgtgttagggtattttgagttagttttgttataaattattttgtttaggtaatatattgtaaaacgttttataatttaatggttttttttttagaaaaaaagtagtgaaagttttaatagttaaaaagtgtttaatttaattgatttttgggaaaaaatattcgtataattttagatagttttaatttttgaaggtaatatagtttggtttttgttgataaataaataaaaataaaaaaattatatatatatatatataaattagttttttgtttttaagtgtgtaagaatgttagtatttaaaatttttaagatatataaaaattaaatagaattgtttaagtttttaaagggagtttggaaatttgaagaaagtaaagttaaaaatattgttttatgagttatataattatttttttttttattttttatagttttttttttatttattatttaggtaattttgtatttaaatttaataatttaatattttatttgttataagaatacgttattatgttattttaagtttttttgggtaaattatatataattagataggttgggttagggttgtttataagattttagtttagagtgtggtgtagtagtttattttttttaggatttttgttgtaataggatatgggagaagggaaatattaacgttagtagaatgggaggaattagattatggagatatgatttttgttttttggtatttttttagttgatttagaagaggatatagagggagatagatatatggttatttttataattataaattttgttatatgttgagaggatggttttttaaagttagttagtgtataagtagtggaggttgggattgttttattttttttgtttagggttatatagtttggtagatttggaaagatttttttgagaaagtgattttggaattgatattttagtggaaataattaggtattgggagggggtgaggtgaggagaaggttaagaatttttatgtagagggaattttgtgtagagattttagttaggaagaggttttgtatagtggaggaattgaaagttaatagttaggttatagtatagagtaaatgatgttggggtgtgaggtgatgttaaaaggtagatattagggttagagggcgtataattttgtaggtcgtgttaatgattttgttttttatttaagaatgttattttaggagattagttaaaaggttagggtgatggtgacggtggaaatatagaaaaaggaatttatttaagaggtatttaaaaagaagtgaaatagagatgagttggagatagattggataaaaagagtgagggagagggaggtgttaggttgtagtttaggttttgagttgttaaagaggagtttttttttttaggtgagttaaggtttagaattacgatttttggttatttttttttatttttagtgtgagaagtggcgagttggttgtttaggtatatattgttattttatatttattgtttaagatagaggcgtatatttggaaagtgaatgagttaggagttagaggagaaggtatgtcggtagaggttagggcggagaggaggaagagagtttgggggcgcgtttttaaaaaggagttagggaagatagagtagaggtcggggaggggagagtaaggattatgataggaggaaagagaggttagggaatattgaggtggaggaattttgggatatgatagttgtaaagaattgtagttaatttaatttagtttttttaatgtgtaattgaggaaattaatttttatgcgtttattttattgtaaatgtggtatttgtatttgagaaattttggaaaatataaagatgtaaagtaaattaagattatttatagtttttttatttagagatatgtattgttaaagtaaggattttgatttttttttttttttgtatttttattatggttggaattgtaatatagacgtaattttatgttttgtttttaaaatataaataatggttgtaaagcgttttatacgttgatttaaagttttttttgaaataggaaattgagatacgtcggttgtgaaatttattgaagtgagcggcggcgttaggatttttgggatttcgatttttttgtagttcgtatagttaagggcgagggcgtttttcggtagaagtagtaaatcgtcggtaagtttagcgaggagggttgtcggggtttgggtttgggaattggttggtatttagcggaaagggacgtgagttgagcggcgggggagaagagtgcgtaggttagaaggcggcgcgtagcggcgtttcgcgaggtttttacgtcgggcgatatggggtgtttgttgtttttgttgttttgggcgtttttttaggtttggggaagcgttgaaggtgggtggaacgagggcgtttgagtgtattcgcgggagggcggagagagggagttgggtagggacggggagggtaacgtttgatggggattggtgagattcgggacgtattggcgcgatttaggtagaaaattcgttgttttttggtttcggggagaggtagcgcggtatagagttcgttggtattagtcgttttttgaagtttatttttttttgttttttttttttttttttttatgttggttgttttttcggttatttgttacgcgtttttaatttttatttttttttagt

SEQ ID NO: 12 - DNA, 5525 bp, Artificial Sequence
  chemically treated genomic DNA (Homo sapiens)
attgggagagaatgaagattggaggcgcgtagtaagtggtcgggagagtagttagtataaagagaaggaagaaagaaataagaggagatgagttttaggaggcggttgatgttagcgaattttgtgtcgcgttgttttttttcggagttagggagtagcgagttttttatttagatcgcgttagtgcgtttcgggttttattagtttttattaggcgttgtttttttcgtttttatttagtttttttttttcgttttttcgcgagtgtatttaagcgttttcgttttatttatttttagcgtttttttaagtttggaggagcgtttagagtagtagaaatagtaggtattttatatcgttcggcgtggggatttcgcggagcgtcgttgcgcgtcgttttttgatttgcgtatttttttttttcgtcgtttagtttacgttttttttcgttgggtgttagttaatttttaagtttagatttcggtagtttttttcgttgggtttgtcggcggtttgttgtttttgtcgaagggcgttttcgtttttagttgtgcgagttgtaaagaggtcggggttttaggaattttggcgtcgtcgtttattttagtaggttttataatcggcgtgttttaattttttgttttaaaggagattttgggttaacgtgtgggacgttttataattattatttatgttttggaagtaggatataaggttgcgtttgtgttataattttaattatggtaaaaatgtaaagggaaaaaaggattaaagtttttgttttagtagtatatgtttttaggtggaaagattatgagtgattttaatttgttttatatttttatgttttttaaaattttttaagtgtaagtattatatttataataaagtaaacgtatgaaaattaatttttttagttgtatattgagagaattggattaggttggttataattttttataattgttatattttaggatttttttattttagtgttttttagtttttttttttttttgttatggtttttgttttttttttttcggtttttgttttgttttttttgatttttttttggggacgcgtttttagattttttttttttttttcgttttagtttttgtcggtatatttttttttttggtttttgatttatttattttttaaatatgcgtttttgttttaaataataagtgtaagatgatagtgtgtatttggatagttaattcgttattttttatattgaaaataagaaaaagtgattaaaaatcgtggttttaagttttagtttatttggaggaaaagatttttttttggtaatttagaatttgggttgtagtttgatattttttttttttttattttttttatttaatttatttttaatttatttttattttatttttttttgaatattttttgaataaatttttttttttatatttttatcgttattattattttaattttttgattgattttttgaagtagtatttttgggtagaaaataaaattattagtacggtttgtaagattatgcgttttttagttttggtgtttattttttgatattattttatattttagtattatttgttttgtattgtagtttggttgttagtttttagtttttttattatgtaaaatttttttttgattaaggtttttgtataaagttttttttatatgaaagtttttgattttttttttattttatttttttttaatgtttagttatttttattaaggtattagttttaaggttatttttttagggaagtttttttagatttgttagattgtgtgattttaggtaggagaagtagggtagttttaatttttattgtttgtatattaattggttttgagaagttatttttttagtatgtagtagagtttataattatagaaatggttatatgtttgtttttttttgtgtttttttttaaattagttggagaggtgttagaaggtaaggattatgtttttataatttgattttttttattttgttaacgttaatgtttttttttttttatattttgttgtagtaagagttttagagaaaataggttattgtattatattttaggttgggattttgtagatagttttaatttagtttatttaattatgtgtaatttgtttaaaaaagtttaaaataatatagtaacgtgtttttgtaataaataaggtgttaaattattaaatttggatataaaattgtttaaataatggataggagggaaattatgagaaataaaaagaaaaataattatatgatttatggggtaatatttttaattttattttttttaaatttttaagttttttttaaaaatttgaatagttttgtttagtttttgtgtattttaaaaattttaagtgttaatatttttgtatatttaaagataagaagttggtttgtgtgtgtgtgtgtgtggtttttttgtttttgtttgtttattaatagaggttaggttatattatttttagaagttaggattatttggaattatacggatatttttttttaaaggttagttgagttagatattttttggttattggaatttttattgttttttttttgggaaaggaattattgaattatgaaacgttttgtaatatgttatttaaataaaatagtttataataagattgatttagaatattttagtatagagagatggtgatttatttagagttttaaaataagtttacggtgggtattatatgattttatttatatgtggattttaaaatagtttattattttatggaaatagagttagggtagtggtttttaggagttggagggaaggggtaaatgtgttaattttggttaaagggttttagttttttaattttgagaggttgattaaaattttggagtttgattataagggatttatttggttttagtttagaatttataatttataacgttaaattagttggaattttatatgttttttttatgtttttgttattttaattataaggagattatttaatgtataaaggatagttgtatatgagaatttaagatttttgagaggatatattagggaaatttttataatagttattaggaggataatattaacgaattaaagaattttttttaatagtattttttataagttaatttgattaaaattaaataatttaaagtttagttaataaagtttaatagtatttaagtgtaattgtttatagtttttatttagagtataatggtgattaaggatcgtagtttgttgtaaaatggtttgatttaaagaggtatttatttttgtaagtagtttgataatataaattatagtaatttggagatttattaaaagaaatataaggattagaaaattttgtgatagtttttttatttttcggacgtttagttttaggagtaaaattttagcgattttgggtttcgttttcgtgaaagtggaaggcggtcgatgaggacggttttgagggaattagattaatgagattagtttggggcggggcgcggggttagagggtggggtaggtggcggcgatggtagttcgaggtttggtttcgcgtagtatatgatagtacgttagtagcgggatggttttagtagtggcggcggttgtagaagtttaagtagttgcggtcgtagtggaggttggagttggattggcggcggcggtatttttgggagtttaagatgtcgggggtgggggggtcgcggggtagcgttatgggttttagtgcggacggttggggtaggataatattatcgtattgtatgtgaagtttatcgagtcggcgatttaggcgttttagatttattagagttataagaatttaattttttttcgatttttaatttagttttaaagattttaggagtttgttaaaatttttaaaaatgatttttttaatgaagtttataattttaatttttatttgttaaatgtgggtaaagataatttttagggtagttttgattgcgtttagtaaatattttttagttttggagttttttagtttaattgtttgggatttatataagataaaattatagtgtgtgtaataaacgattcggattagatgatacgagaaagaacgatttaggtagaggaggaatttcgtaatcgaagtatagaagttattaaattcggtggattatatgtagggaaaagagtgtaaattcggaaagtattttaagttgttttagatatagtttttgagaggaaaaggttaatttttatgaattttgtaaatttaattcgatagatatatagtagtagtagcgttttttagaagttatatagggatagggtggtttatttattggttttgaaggtttataagaaatcggagttatttgttagattttagaaagatggtgttaattaaaaagataggaattttttgggagtaattttgtaataggtagttaatttgaattttaaggatttttcgtatattttaaaggattatgtttttaaagagttttagagagattggtttggatatagtgaaatagatatttggttattggagttaatgttttttagaaaattaaatttattttagaatgttgtaggtattagtcgtttagaatttttagtatgttttagtagaaacgttgtattttttttttagatacggtttttggatttagagtttattgattatttaatggataaaaaagttcgaatattttatttgacgagtagagtattattaatattaaatggttatttgaattttattagtgaaaaatttgttgtaggtttttttttgttttttgtagttgttgttatttttatttttttatcgtttgtttttaatttatttgtcggttttatattttttttagattgtaaattttaattttaatttttttagtattttagaaggtcgggggtttaagatttatttgttgatagttttagttaaaataatagtatttatgagaattaataagataagtatatttttaggatttttttggaaattttattttttggtttagttttattaaagtgtttaaagtttatggaagaaaattatttagtgttttataaaaagtttaaaaagaagtttaaaaaatataaggaaaaggattaaataaaaaagtacgatattgagattattgaggaaaaggagaaagattttaagagagaagaggaaattgttaagttaaataattttagtttaaattttagtggaggagttaaagaggattgtattgtttttatggaatttttagtaattgaatttttagattatttgataaaatatattgttattattttttatgagtaacgtcggaattataaagatgacgttagtgtagagtatgatgagtatagagttttgtatgttaggatggagattgtagttagaagatttattaaattagatgtataaagaaagcgtttttttttaggtttaaaagagtattagaatgtttatgaagaagttttataagaatatcggaagataaagtagtttagttttaattattatgaagaaaaat

SEQ ID NO: 13 - DNA, 5659 bp, Artificial Sequence
  chemically treated genomic DNA (Homo sapiens)
taatgattatttttagtgtttagttttttttttaagtaaaatatataattaatgttaggtaagttttttttaatggttttttagagagttaaacgtttttatgttgagttggaaatattgatgtttttttttttttgagatagagttttattttgttgtttaggttggagtatagtagtacgatttcggtttattataatttttgtttttcgggtttaagtgatttttttattttagttttttaagtagttgggattataggtatgtattattatgtttagttaatttttgtagttttagtagagatagggttttattatgttggttgggttggttttaatttttgattttaggtgatttgtttattttagttttttaaagtgttgggattataggtacggtggtgttcgattgatttttttttttttttttttttttttttttttttgagacggagtttcgttttgtcgtttaggttggagtgtagtggtgtaattttagtttattgtaagtttttttttttaggtttatgttatttttttgttttagttttttgagtagttgagattataggtattcgttattatatttagttaatttttttgtatttttagtagagacggggttttatcgtgttagttaggatggttttaattttttgatttcgtgattcgtatattttcgttttttaaagtgttgggattataggcgtgagttattacgtttggttcgattttttttttaaatgttggtttttttggttttaatattttgttattattttgataattaagaaatatgtttttgttttaaataataaagattaagagattatttgttttaggtaaatagaaaaatttttattattttttttaatgtgtttagtaaaattataaaggtaattatgttttggggaattaattattttatatagtatgaagtaaataaagttattttgtttaataaattaaataatattagttagttgaggggtataaagaatgaattaattttttttttttgttttattaattttttaagttttatttttaagtatttttgatttaaagataagattgtttttttttgattatttaatttttattatgtttattattaaagttaaagtagatgtaataagttttaatattattgaatttaatattttaattaatagaaatatagattatatttaggttgggtgtagtggtttacgtttgtaattttagtattttgggaggtagaagtgggtggattttttaggtttaggagtttgagattagtttgggtaatatagtaaaatttcgtttttattaaaaattgaaaaaaattagttgggtatggtggtacgtgtttgtagttttagttacgagaaaggttgaggtgggaggattatttgagtttagggaggttaagtttgtagtgagtcgtgatcgtattattgtattttagtttgggtaatagaatgattttgttttaaaggaaaaaaaagaaagaaagaaaagaaatgtagattacgttttagtagtttgggtgaaagttatgaaaataatttacgggaaaaaataattagtttgtgaaataatttttgtaatataattaagagttagtgagaggaggtgatagttaattaagtatgtgaaatgaaatgttttgtagttagttatatttttaggagggttatttttagtttatgtagtttttataagttgttttaatgttataaaaatattatttttatcgagtttatattatttttttggagattgaagagatatttaaattaaatttttgagtttttttttttagtttatttaagttaatttataaaaatataggggaaagaatatagttttaaaaaattaaaacggaaaataaaaaatgtagaaattatagtatgaagttaagagtttaaataagtttataatattaaagatattttatgagtaaaataagaaaattaagtagtaattatttagtttattgattatggttttttttggaatgtagtgaaagatttagttttgttttttgtatttattataggtgttaagagtttaaggagggtttaagattaagggaagttaaatattgttagggaaagtaaatatatgtttaaattattatttttaaataagtttattatttataatttaaaattattaatttttatgtggtttttgtaagtattttttaattttatttttaaataaagagaaattattacggaagtattttttttagaagataatttataattattatttaattcgatttttttttttttttttttttggaaattttggtatatggatttgttattattgttaagaattatttagggttaggcgcggtggtttacgtttgtaattttagaagtttgggaggtcgaggtaggtggattatttgaggttaggagtttaagattagtttggttaatatggtgaaatttcgtttttattaaaaatataaaaattagtcgggtatggtggcgggtatttgtaattttagttatttgggaggttgaggtaggagaattatttgaatacgggaggcggaggttgtagtgagttaagatggtattattgtattttattcgtggtgatagagcgagatttcgttttaaaaaaaaaaaaaaaaaaaagagagacggagttttagttttgttgtttaggatggtatgtagtaatacgatttttgtttacggtaatttttgttttttgggtttaagtgatttttttgttttagttttttgagtagttgggattataggtatatattattgtgtttagttattttttgtatttttagtagagacggggttttatcgtgttggttaggttggtttcgaatttttgattttaggtgatttatttgtttaggttttttaaaatgttgggattataggtgtggtgagttattgcgtttagtttttttttttattttggggaatattttattttgtttatggagtagttgttgttttattattttatttttttaataaatttgtttatattttgtattgcgattcgttttgaattttttttgtatgagatttaagaatttttttttgtggtttggattgggattttttttttgtaataaatgtattggttgataggagaataaagaaaaaaaaagaggaaaaattagagtaatttttttatataattatattatatgatcgttttgttaattatgataatagttaataaaataatttttttatgtttaatttttagtttatgtttgtatgttttaaaatgttttttatagttggtttgtttaattatttaatgaaggattaaatattgtagttggttgttatgtatttagttttttaattttgatttttagattatttttagtttattttattatattcgttttaagttttttgagttagttaattttaatttgttatgtattttataaaatgttttttttttttttatagtcgattgtttttttgtttttggagtttttttttttattttttaaggttattttgagtatatttttttgtttcgtgaaatttatttttttttttttttttttttttttgagtttaattagttgttatcgtaggtttttgtttttttttatagtgtggttagaattcggttttgtttgttagtagagggtagggtcgttgtttttttttttttgtagtttttaagtttagtatatgtttggtatttagtggtagtataataaggaatttgatgaatattttttttttttgtttttcgttttttttttatagtttgttagttatggttaggaagagtaagattcggaatgggtttggtgtgtttcgcgggaaggtcgtgattttggaagatgttttttagtttagttcggattttttttttttagttttagagattttttttattttttgtgtatatatatatattaagatttaggaagtggtttttgaggtaggattttaagagtttaaggagtggggtcgaggttggaggtgtgggggtgtgacggtcggttttatttttcggtttgtttagattagttttttttggggattatttttggtatataagggagggaggtagtttgatttttttagttcgtttttagtttttatttggttttgttttttgggataagacggggaaatttagaggatgtaagttttttttgttttcgtgtttttttttaagttttcgttattatagacggatgtaggagttgtttgggaggttggaagtatagattttgttaatttttttttagagggcgggattcgacgcggacgtgttttgattgattgggtagcgtggtttcggggaagggtttttttttttttttttagattaggatttttggaaaatggagaagttgtgttaatagaggggggttagaaatttttattttagaatgttgtagaatgttgggagatatttaggatgtgagttagggattttttggaagtgtttgttttggttttattcgattttaggtagtttttagttgtttgtatagtcggatggggagggggtttgtatagagttggagttagaggagagagttggtttattttttacggtaggatggggaaattttatagattatattgttattcggttttagtttttcgtttcggcgtttagagggtaatttttatttatttcgttcgtttttttgaattagagtgatttaggttgcgtttcgtttcgtttttttatttcgagttggtacggaggtatagcgttagaggggggttttaggcgtttcgaggttttgtttttgcggttttttttttgcgggggtgggcgttttttttcgggtaggggttacgtggttttggtcgggcggggggttcggtttatttcgcgtcgggtttagtgatttaggtcgtagttgttatcgcgttatatgagggaggtcggcggttattcggcgggggaggggatcgtggttggagttcggggcggggtcgcgcggtaggcggggcgggagtcggggggcgtagttagagagtttcggagtcgcggcgggagaggaacgcgtagttagttttgggaagtttaggtgaggtcgcggggattcggcggatttcggcgcgggttgggagagattattcgtagtttttttttttagggttcgttttaggttcgcggagattcgttcggcgttttttagtcgttttggagtaattttgtttcgaagttttttgggttcgggtagggtgtggcgggggtgttggttgtattttttttttttttggtgggcggggaggttagagtttaggggaaaggggttggggcgggggtcggggttgggttgaagatcgtttttttaggttgggtgttgggtggggaaagggtgtttgacgttcggagattggcgggtcgagggtcggcgttaggtttaagtttttgtcggcgtttttggatttgttttgggttttagaggcggcggggcggggttcgggtttcgcggtcgtcgtttttattttttttttgcgggtaaagagggggttgggagacgtggattcgatcgcgggttttcgggtgggaggggtcgggaatcggggtcgtgaagggaagttttcgagggtcggtcgggagttcggaaatcgaggttttttttcggttagttttaattttttcgtttttttttttgttttagg

SEQ ID NO: 14 - DNA, 5659 bp, Artificial Sequence
  chemically treated genomic DNA (Homo sapiens)
tttggggtagaggggagggcggggggattaaaattggtcgaagggggatttcggttttcgggttttcggtcggttttcgagggtttttttttacggtttcgattttcggttttttttattcggaaattcgcggtcggatttacgttttttagttttttttttattcgtaggagaggggtgggggcgacggtcgcgaagttcggatttcgtttcgtcgtttttggggtttaggatagatttaagggcgtcggtaggggtttgagtttgacgtcgattttcggttcgttagttttcgggcgttaaatattttttttttatttaatatttagtttggagaaacggtttttagtttaatttcgattttcgttttagttttttttttttgggttttgattttttcgtttattaaaaaaaaaaaaagtgtagttagtattttcgttatattttgttcgggtttagggaatttcgaagtaaagttgttttagggcggttggagagcgtcggacgagttttcgcgggtttggggcgagttttggaggaagggattgcgggtggttttttttagttcgcgtcgaagttcgtcgggttttcgcggttttatttgggttttttaaggttggttgcgcgtttttttttcgtcgcggtttcggggttttttagttgcgtttttcggttttcgtttcgtttgtcgcgcggtttcgtttcgggttttagttacggttttttttttcgtcgagtggtcgtcggttttttttatgtgacgcggtaatagttgcggtttgagttattgggttcggcgcggggtgggtcgagtttttcgttcggttagggttacgtggtttttattcggaagaaggcgtttattttcgtaaagggaaagtcgtaagggtaagatttcggggcgtttggggtttttttttggcgttatattttcgtgttaattcggggtaggagagcggggcggagcgtagtttgggttattttggtttagagaagcggacgaggtgggtgagagttattttttgagcgtcggggcggagagttgaggtcgggtgataatgtggtttgtgaggtttttttattttatcgtaggggatgagttagtttttttttttggttttaattttgtgtaagttttttttttattcgattgtgtagatagttggggattgtttggggtcgggtggggttagaataaatatttttagaaagtttttggtttatattttgggtgttttttaatattttatagtattttagagtggggatttttggtttttttttattagtatagtttttttattttttagggattttagtttgagaaaaggggaggaagttttttttcgaagttacgttatttagttaattaagatacgttcgcgtcgggtttcgttttttgggggaggattgataaggtttgtgtttttagttttttagatagtttttgtattcgtttgtgatagcgagggtttgggggaagatacgaaggtaggagaggtttatattttttggattttttcgttttattttagaagataaagttaggtgagggttggaagcgggttagggggattaagttgttttttttttttgtgtgttaggggtggtttttagaaggagttgatttgaataggtcggagagtaggatcggtcgttatatttttatatttttagtttcggttttattttttgggtttttaaggttttgttttaagaattattttttgagttttagtgtatgtgtgtatataaagaatgaaagaagtttttagagttaaaggaaggagattcgggttgggttgagaagtattttttaggattacggttttttcgcgggatatattaagtttatttcggattttgttttttttgattatggttggtaggttgtggaggaggagcggagagtagaagaaaggagtatttattaggttttttattgtgttgttattagatgttaggtatgtgttaggtttgggggttgtaaggagaggaagatagcggttttgttttttgttagtaggtagaatcgagttttggttatattgtgaagaaaggtagaagtttgcggtggtagttggttaagtttagagggagggaaagggagaggagaatggattttacggagtagaaggatgtgtttaaggtgattttggagaataaaggggagagttttagggatagagaagtagtcgattgtggaaaaaaaaggagtattttgtaaagtatatggtaggttggggttggttggtttaaagggtttgggacggatgtggtgagatgggttgaaggtggtttgaagattaagattgagagattagatatataataattaattgtaatgtttggttttttattgaatggttgaataaattagttgtgaaagatattttgggatatatagatatggattgagaattagatataagaaaattattttgttaattgttattatggttaataaaacggttatataatatgattatgtagagaagttattttagttttttttttttttttttttttatttttttattagttaatgtatttgttataggaaaggggttttaatttagattataagagagggtttttggattttatgtaagaaagatttagggcgagtcgtagtgtaaagtataagtaagtttattaagaaagtaaagtggtgaaataatagttgttttatagatagagtaggatgttttttaaagtaagaggaggggttaggcgtagtggtttattatatttgtaattttagtattttgggaggtttaggtaggtggattatttgaggttaggagttcgagattagtttggttaatacggtgaaatttcgtttttattaaaaatataaaaagtagttgggtataatgatgtgtgtttgtagttttagttatttaggaggttgaggtaggagaattatttgaatttaggaggtagaggttgtcgtgagtagaaatcgtgttgttgtatgttattttgggtaataagattgaaatttcgttttttttttttttttttttttttttgagacggagtttcgttttgttattacgggtggagtgtagtggtgttattttggtttattgtaattttcgtttttcgtgtttaagtgatttttttgttttagttttttaagtagttgggattataggtgttcgttattatgttcggttaatttttgtatttttagtagagacggggttttattatgttggttaggttggttttgaatttttgattttaggtgatttatttgtttcggttttttaaatttttaggattataggcgtgagttatcgcgtttggttttaaataatttttaataatagtagtaagtttatgtattaaggtttttaagaaagaggagggaagagaatcgagttgggtagtagttataggttgttttttgaaaaaggtgttttcgtgatagtttttttttgtttggagatagagttaagaaatatttgtagagattatatgagaattaatgattttggattgtgaatggtagatttgtttggaggtgatgatttagatatgtgtttgttttttttggtagtgtttggttttttttgattttaagttttttttaggtttttgatatttgtgataaatgtaggaggtagggttgaattttttattgtattttagaggaggttataattagtggattggatggttgttgtttagtttttttattttgtttatagggtgtttttgatgttataggtttatttgaatttttagttttatattatagtttttgtattttttgtttttcgttttgattttttaaaattatgtttttttttttatgtttttataggttaatttggataagttgaaggaaagagtttaaagatttggtttgaatgtttttttaatttttagaaaggtaatgtaggttcgatggaagtaatgtttttgtgatattagagtagtttatgggaattatataggttggaaatgatttttttgagaatgtagttggttataaagtattttattttatatatttgattgattgttatttttttttattgatttttgattatgttataggaattattttataagttgattgttttttttcgtggattgtttttatagtttttatttaggttgttagagcgtggtttatattttttttttttttttttttttttttttttgagataaggttattttgttgtttaggttggagtgtagtggtgcgattacggtttattgtaggtttgatttttttgggtttaggtgatttttttattttagtttttttcgtagttaaaattataggtacgtgttattatgtttagttaattttttttaatttttggtagagacgggattttgttatgttatttaagttggttttaaatttttgggtttaagggatttatttatttttgttttttagagtgttgggattataggcgtgagttattgtatttagtttgagtatggtttatatttttgttggttaagatgttaaatttagtgatgttaaaatttattatatttattttaattttgataataggtataatgggaattaaataattaggagaagatagttttgtttttaggttagaagtatttagaaataaaatttggaggattggtggaataaaaaaaaaaagttaatttattttttatgttttttagttaattgatattatttagtttattaagtaagatgattttgtttattttatgttatgtggggtgattggttttttagggtatagttgtttttgtagttttgttaggtatattggagaaaatgataaggatttttttatttgtttagagtaggtggttttttaatttttgttgtttagaataagaatatgttttttggttgttaaagtggtggtagggtattaaaattagaaaaattagtatttaagaaaaaaatcgggttaggcgtggtggtttacgtttgtaattttagtattttgggaggcggagatgtgcggattacgaggttaggagattgagattattttggttaatacggtgaaatttcgtttttattaaaaatataaaaaaattagttgggtgtggtggcgggtgtttgtagttttagttatttaggaggttgaggtaggagaatggtatgaatttgggagggggagtttgtagtgagttgagattgtattattgtattttagtttgggcgatagagcgagatttcgttttaagaaaaaaaaaaaaaagaaagaaagaaaaaaattagtcgagtattatcgtgtttgtaattttagtattttgggaggttgaggtgggtagattatttgaggttaggagttgagattagtttagttaatatggtgaaattttgtttttattaaaattataaaaattagttgggtatggtggtatatgtttgtaattttagttatttggggggttgaggtgggagaattatttgaattcggaaggtagaggttgtagtgagtcgagatcgtgttattatattttagtttgggtaatagagtgagattttgttttaaaaaaagaaaaatattagtatttttaatttagtatgaaagcgtttagttttttagaaagttattggaagaaatttatttgatattggttatatattttgtttgggaaaaaaattaaatattaaaagtaattatta

SEQ ID NO: 15 - DNA, 6621 bp, Artificial Sequence
  chemically treated genomic DNA (Homo sapiens)
tttgtatttttagtagagatggggttttttttttttttttttttttttttttgagagggagtttcgtattgttatttaggttggagtgtagtagtgttatttttatttattttaattatcgttttttaggtttaagtaatttttttgttttagttttttaagtagttgggattataggtgtttattattacgtattattaattttttgtatttttagtagagatggggttttattatgttagttaggttggttttgaatttttgattttatgatttatttatttcggttttttaaagtgttgggattataggcgtgagttattatgttcggttaagatggtgttttatcgtgttggttaggttggttttgaatttttgatttcggttttttaaagtgtcgggattataggtgtgagttattgtgttcggttaggagttttattgtgaagggaaggaatgaatatagttggaggggaaagtggtattaaggaaaggttttttattattaataataaatattttattgaaatatattatttatatagaatagttaataaattttgagtgtgtagtttaatgaatttttataaggtgaatatatttaggtaattagtatttagattaagaaatggaaagtggttaggtgtagtggtttatgtatataatgttaatattttgggagtttaagacgggaggatcgtttgagttcgagagtttgagattagtttgggtattatagttagattttcgtttttaaaattatatatatatttttttttgagatagagttttgttttgttgtttaggttggagtgtaatggtatgattttagtttattgtaattttcgttttttgggtttaagtgattttattgttttagttttttaagtagttgggattataggcgtgtgttattatattcggttaattttttgtatttttagtagagacggagttttgttatgttggttatattggtttcgaatttttgattttatgatttatttatttcggttttttaaggtgttgggattataggcgtgagttattatgtttagttaaaataaaaaataaaatttttaattagttaggtttatgggtgtatgtttgtagtttaggttatttaggaagttgaggtgggaggattatttgaatttagaagttcgaggttatagtgagttatgattatgttattgtattttaatttgggttatagagtaagattttgttttaaaaagtgaaaaataaataagaaatagaatatgattagttgttaatattttttttatggttttttgtagttattattatttttttgaaaggtaattagtattataattaattttttttttttttgagacggagtttcgttttgttatttaggttggagtgtagtggtttaatttcggtttattgtaatttttattttttgggtttaagtaatttttatgttttagtttttatagtagttgggattatagttgtgtattattatatatggttaatttttgtgtatgtatatatgtgtgtatatatatgtttgtgtatattatatgtgtgtatatatgtatattatatatgtgtgtatatatgtatatatatatatatatgtatatgtatatatatatatatatgtatatgtatatatatatatatatgtatatgtatgtatatatatatatgtatattatgtatatatatatatgtatgtatattatgtatatatatatatatatatgtgtgtgtgtgtatatatatatatatttttttttagtagagatgaggttttattatgttggttaggttggtttcgaatttttggttttaagtgattcgtttgttttagttttttaaagtgttgggattataggtgtgagttagatttaaatagtatgttttttttgtgtttttttttttatgtttgatagttgatgtgagatttatttttattgtgggtagcgtttttgttttttttattattgtataaaataattttgttttatttatttattttattgttgatgggtattagggttgttttttgtttggagttaaaatgattaatatggttatgaatatttgtgtatatgtattttggtatatttgaattgtattgtagtttttgtgttaatttttttttttttatggttttttgtggttattttttcgtttttttatatgatttttatagttgtttgtgattttattttggttatttttagtgatttttttgggtgtatttttgaattatggattcggttatttttttgtggtttttattttagttttagttttgcggttttgttttattatattaagtttttaatgttggtgttttttagatttagggttttaaaaattttttgtatatttttaatgggtattattatttttatgttaattaatattaaatttgttttttgattatattttttagttagtttattagtataaaattgagtttattaaatttttttaagaagtatgtttttaattgttgaaatgttatatttatttaggtatttgaattattatttaagaattattttagtttttttttttttttttagttttttataattttaatttttaattattaaaatttgatgagatttattttttttagggtttatagaattattttttttttttgtttttaaggtttttattttgttttagaattttttagatttttgagatagttattttttttttttttaggtttttttatttttttttattgatttattttaaagtaaatttgattcggttattatatattttttattgtttataggataaggttaaattttttagtaaattttaatttttttaagaattgttttttatagttagttttatgtgtttattttagaatcgattggattaatttaggagtagttttcggtaagtacggcgtttttttttattttttggttgtcgagggtcgtttttttagaaagtattttttattagttttaagttttttttttttagtaattttgatttttagttttaattttttttaggacgtgttttttatcgtattgttttttttagttttcgttttttttttaggtgtttattatttttttataaattatagttattgttatggtaataattttattattagaaggagttttatgtttagcggattagagttttttgagagtagggattgtggtattattttaagtattgaatttgttttagtaatttttaaataaatatatgttgaatgaatgaatgtagtaataggaatgttgagttaagttttgtttttgttttttgagacggagtttcgttttgttgtttaggttggagtgtagtggttcggttttggtttattgtaagtttcgtttttcgagtttagttatttttttgttttagtttttcgagtagttgggattataggcgttcgttattacgttcggtaattttttgtatttttagtagagtcgggttttattatgttagttaggatggtttcgattttttgatttcgtgattcgttcgtttcggttttttaaagtgttgggattataggcgtgagttatcgttttcggtttgttgagttaagtattaaattatataaaatataggaggagaggaaagtatttagagatacgatagggagaattatttgaaatagtgggattatagattatgtgaattgtgtagagaggtttaaatagtttggggtttttggagggaagggaggtttttgggtggtggagtattggtgtatagaaaaggagatgaattttgagagagaggttttttattgtgaagggtttggtgttggggttaaaggtttggggtttttatttgtttagtatggttttttaaattgtagggttttttttttttgagtggggggtagggggtgttttattttgttgtttaggttggttttaaattcgtgggtttaggtaatttttttatttcgtttttttaaagtgttgggatgataggcgtgagttattaagtttagtagtaggttgtaattaaattatgtatttatggtttttaaaattcgtttaggagttgttataggttcggcgttgtaaaagtaaatatgtttatttagaaaatggggataatttttatgttatagagttgtaaagattaaatgaattaatatagattaatatattgggaatagtgttaagtgtataagtattatgtaaattttagttattatttgttattattgtgtttgttgttatttttttttaggagtttttagggggttaagaagtggtgggaaagaaagaaatgattttaagagtatttaataagggttagaatggaagtgagtaaaaaatgttgaggtttatagtataggttgtattgcggggtttaaattttatgaggttagtagtatttagggtttgtgagttttttagagttgggttttggtggtcgagtttagttttgggggttattgtatttttttttttattataaaatggggtttggaggttcggggcggaagaaaggggtttataatattgtacggttagaggtcgagttaaggttggattcggttagatttttataggttttttttagtttttatattgttttagagtgtggggcgttcggttgggggcgaggtagcggaggtttaaagggggtcgaagttaattggacggtagttcgcgatgggaattacgttttttagtatgcgacggggtaaaggggttttttagtcgcgagtagcgtttcgtaggttttgttgggagtttttattgatttttgtttttttttttattttgattttcgtttttttgttttgggtttcgtttttttttgagagtcgatgatttggtagagtttcgcgagtcgttttttttttttttttttattggtttagtttagttgttattcggttgagaggaggagaagttgtttattgattggtggatttcgtttggcgttaattaggaaaggggggcggggtagtagttggttttattgagtcgttattatcgcgaaaggtcggtttggttgcgatagtttgggtaagaggtgtaggtcggtttggttttttgttattcggagttgggtaagcgggtgggagaatagcgaagatagcgtgagtttgggtcgttgtttcgaggttttcgttcggttttttttgtcgattcgttacgtttgtttggatttaatttttaggttgtcggcgttcgttcgttcgttggtttcgcggtgtgagagggaagtattcgtgtttgtggttggtggttggcgtttggagggttcgtatattcgttcggtcgcgtcgtttgttcgcggtagtcgcgtttttgaatcgcggagtcgtgtttgtgtttgattcgcgggcgtcggtggcgcgcggtcgaggtcggtgtcggcggggcggggcggtcgcggcggaggtagaggaagagggagcgggagttttgcgaggtcgggcgtcgttatggaattgggttcggagttttcgtatcgtcgtcgtatgtttttcgtttgtagtttttttttcgcgtcgtagttcgtcgtgaaggcgttatttggcgttttagtcgtcgggggattgtcgtttgttattaatttgatcgttattatggattagttgtagggtttgggtaggtaaggagagatcggcgggcggtgtttcgggtttttggtttcggtgtcggtttcggagagattaggttaggaaacggatcgggagaagggcgagattcgttcgttcgggttcgtcgttcggggatagtcgggttagggtttgttatgtgtattttcgttcgggcggaatgttgggcgggagaggtcgtcgggattttttaggggaagaggtggagatttttgggtttaagttcgagttaggtttatttttatttttttcggattgtttcgtattttttttttatttttatttttggaagttttttggaatttattttcgcggggaaaattaggtttttttaggtatttatttttattttttgttaaattatttttaggattttcgtttgttgtgatttttgtttttttttaataaaggattatggtatttttttttttggcgtttatgtaaaattattttagtttttcgttttgtgtatatttttgatgtttattttgttgtttttttaaggttaggtttttttatttaatttttagaaagttttttgggttttttttgatagtaaaaaatgtattttacggtgtttttcgcggaagagttattttttttttaatttttggtatttcgtttgttaagtatatgttttgtgcgttttttaatttttgaaaagtagaaagtgttttgtttaatttttatttcgattttgttttagtatttagaatatatgtttttattttaggaaatattttaatatttgttatagttattataatttgtaatgtggtttaaggttatgtttatttatttttttttttttttttgtttaagtgttaattgggtgtttagagtggtaaagtgggatttttgttatttgtggtgtggtttagaaatggtttttggtagtttggttgttttttaattttatggtttattttttgtatgtgattttttaattatattttataaattatttatggtttatttttgttggttttagt

SEQ ID NO: 16 - DNA, 6621 bp, Artificial Sequence
  chemically treated genomic DNA (Homo sapiens)
attgaaattaatagaaataaattatgaatgatttataggatataattaaaaggttatatgtaggagataggttatgagattaagaagtagttaggttgttagaaattatttttaggttatattataagtggtaaagattttattttgttattttgaatatttaattagtatttgggtaaaggagaaaaaaggagtgggtgggtatggttttggattatattgtaggttatgatggttatggtaaatgttggggtattttttaaaataaaagtatgtgttttaagtattgagatagagtcgggatgaaagttgaataggatattttttgttttttagaagttgggaaacgtataagatatgtgtttagtaaacgggatgttagagattgaagggaaagtagttttttcgcgggaaatatcgtgggatgtattttttgttattaggaaaagtttaggaagttttttgaaagttgggtaaaaagatttggttttaggaaagtagtagagtggatattaggaatgtgtatagggcgagggattgagatgattttatataaacgttaggaaagaaaatgttatggttttttgttgagaaggaataaagattatagtaaacgaagattttgaggatggtttagtaaagggtgaaagtgagtgtttagaagagtttgatttttttcgcgggggtagattttaaagagtttttagggatagagatagaaggagagtacggagtaattcgaaaggggtgaaggtgggtttggttcgggtttaggtttaaggatttttatttttttttttggaaggtttcgacggtttttttcgtttaatatttcgttcgggcgggggtgtatatggtaggttttagttcggttgttttcgagcggcgaattcggacggacgggtttcgtttttttttcggttcgttttttggtttgattttttcgaggtcgatatcgaggttaggggttcggagtatcgttcgtcggtttttttttatttgtttagattttgtagttggtttatagtgacggttaggttggtgataggcgatagtttttcggcggttgaagcgttaaatagcgtttttacgacgggttgcgacgcgggaggggggttgtaggcgaagagtatgcggcggcggtgcgggggtttcgggtttagttttatggcggcgttcggtttcgtagagttttcgttttttttttttttgttttcgtcgcgatcgtttcgtttcgtcgatatcggtttcggtcgcgcgttatcggcgttcgcgggttaaatataaatacgatttcgcggtttagggacgcggttgtcgcgggtaagcggcgcggtcgggcgggtgtgcggattttttaggcgttagttattagttataggtacgggtgttttttttttatatcgcgaggttagcgggcgggcgggcgtcggtaatttgaagattaaatttaaataaacgtggcgggtcggtaagagaagtcgggcgagagtttcgaggtaacggtttaggtttacgttgttttcgttgtttttttattcgtttgtttagtttcgggtagtagaaaattaagtcgatttatattttttatttaggttgtcgtagttaggtcggtttttcgcggtaatagcggtttagtggggttagttgttgtttcgttttttttttttagttggcgttaaacggaatttattaattagtaagtaattttttttttttttaatcgaatggtagttaggttgggttaatgagaggggaagaagaaagcggttcgcgggattttgttaggttatcggtttttagaagggggcggagtttagagtagaagagcggggattaaaatgagagggggagtagaggttaatgaaaatttttagtagaatttgcgaggcgttgttcgcggttgaaaggtttttttgtttcgtcgtatgttgggaagcgtagtttttatcgcgagttgtcgtttagttagtttcggttttttttgggttttcgttatttcgtttttagtcgggcgttttatattttgaggtaatgtggaggttaaggaagatttgtggaggtttggtcggatttagttttggttcggtttttaatcgtgtagtattgtggatttttttttttcgtttcgggtttttaggttttattttataatgagggagggaatgtaatgatttttaggattggattcgattattagggtttaattttggagggtttatagattttgggtgttgttggttttatgggatttgaatttcgtagtataatttgtgttgtgggttttagtattttttgtttatttttattttagtttttattggatgtttttagaattattttttttttttttattattttttagttttttgggagtttttagagagaaataatagtaaatataataatagtaaataatagttaaagtttatataatgtttatgtatttgatattgtttttagtgtgttaatttgtattaatttatttaatttttataattttgtgatataggaattatttttattttttaagtgggtatatttatttttatagcgtcgaatttgtggtagtttttagacggattttgagggttataagtgtatgatttaattgtaatttattgttgggtttagtggtttacgtttattattttagtattttgggagggcgaggtgggaggattgtttgagtttacgaatttgagattagtttgggtaataaagtgagatattttttgttttttatttaaaaaaaaaaaattttatagtttgaaaagttatgttggataggtggaaattttaaatttttggttttaatattagattttttatagtgaggaattttttttttaggatttatttttttttttgtgtattagtgttttattatttaggaattttttttttttttagaaattttaggttatttaggtttttttgtatagtttatatggtttgtggttttattgttttaaatagttttttttgtcgtatttttgaatatttttttttttttttgtgttttatgtggtttaatatttggtttaataggtcgggagcggtggtttacgtttgtaattttagtattttgggagatcgaggcgggcggattacggggttaggagatcgagattattttggttaatatggtgaaattcggttttattaaaaatataaaaaattatcgggcgtggtggcgggcgtttgtagttttagttattcgggaggttgaggtagaagaatggttgaattcgggaggcggagtttgtagtgagttaagatcgagttattgtattttagtttgggtaatagagcgagatttcgttttaaaaaataaaaataaaatttggtttaatatttttgttattgtatttatttatttaatatatgtttatttaaggattattagaataaatttagtgtttgaaataatattataatttttgtttttagggagttttggttcgttgagtataaagttttttttaataatggaattattattatgataatagttgtggtttgtggagggatggtgggtatttagaggaggggcggggattggggaaggtagtacggtggggggtacgttttaaaggagattaaaattaaaggttaaggttgttggagaaggggagtttggggttggtgggaagtgttttttaaggaaacggttttcggtagttaggaggtgaggaggaacgtcgtatttgtcgggagttatttttgagttgatttagtcggttttagaatgggtatatgggattggttgtgagggatagtttttgaaaggattggagtttgttgaagagtttggttttattttgtggatagtggagggtgtgtgataatcggattagatttgttttagggtggattagtggaggagagtggggaggtttgaggaaaaaggaggtggttgttttaaaagtttgggagattttgaagtaaggtgggggttttggagataaaggaagggaatgattttgtgagttttgaaggaggtagattttattagattttgataattgagagttaagattgtagggggttagagggaagggaggaggttagaatgatttttaggtaatgatttaagtatttgggtggatgtaatattttaataattggaggtatattttttggaggaatttgatgagtttagttttgtgttggtggattggttggggggtgtagttaggaggtagatttggtgttgattagtatgaagatggtaatgtttattgaggatgtataaagggtttttaggattttggatttggggagtattagtattgaggatttgatgtagtgagataggatcgtaaagttggggttgagatagaaattataagggagtagtcgagtttatagtttagaggtgtatttaggagagttattgaaggtggttagaatgaggttataggtaattatggaaattatgtaggaaggcgaggaggtggttatagaaggttatgggaagggaaaagttggtatagaagttataatatagtttaagtgtgttaaaatgtatgtatataaatatttatggttatgttaattattttagttttaaatagaaagtaattttaatgtttattaataataaaatgggtaaatagaataaagttattttatatagtgatgaaaaggatagaagcgttatttatagtaggagtgaattttatattaattgttaaatataagaaggaagatataaaagagatatgttgtttaggtttggtttatatttgtaattttagtattttgggaggttgaggtaggcgaattatttgaggttaggagttcgagattagtttggttaatatagtgaaattttatttttattaaaaaaaaatatatatatatatatatatatatatatatatgtgtgtatatatatataatatatatatatgtgtatatatatataatatatatatatatgtgtatatatatatatatatatatgtatatatatatatatatatatatgtatatatatatatatatatatatgtatatatatatatatatatatatatgtaatatatatatatatatatatgtaatatatataaatatatatatatatatatatatatatatataaaaattagttatgtatggtggtgtataattgtaattttagttattatggaggttgaggtatgagaattgtttgaatttaggaggtggaggttgtagtgaatcgagattgagttattgtattttagtttgggtgatagggcgagatttcgttttaaaaaaaaaaaaagttagttatggtattagttattttttagaaagatggtggtgattgtaaggggttatgaaggggatattggtaattggttatattttgttttttatttattttttattttttgagatagagttttgttttgtggtttaggttggagtgtagtgatatgattatggtttattatagtttcgaatttttgggtttaagtgatttttttattttagttttttgagtagtttgaattataggtatgtatttataaatttagttaattaaaaattttattttttattttggttgggtatggtggtttacgtttgtaattttagtattttgggaaatcgaggtgggtggattatgaggttaggagttcgagattagtgtggttaatatggtaaaatttcgtttttattaaaaatataaaaaattagtcgggtgtggtggtatacgtttgtaattttagttatttgggagattgaggtagtagaattatttgaatttaggaggcggaggttatagtgaattgagattatgttattgtattttagtttgggtaatagagtaagattttgttttagaaaaaaatatatgtataattttagagacgggagtttaattatgatgtttaggttggttttaaattttcgagtttaagcgattttttcgttttggatttttaaagtgttagtattatatgtatgagttattgtatttggttattttttattttttgatttgggtgttggttatttgagtgtgtttattttgtggaaatttattgagttatatatttaagatttgttagttgttttgtatgaatggtgtattttaatgaaatgtttattattagtgataaaaagtttttttttgatgttatttttttttttaattatatttattttttttttttatagtaaaatttttggtcgggtatagtgatttatatttgtaatttcggtattttgggaggtcgaggttaggagtttaaaattagtttggttaatacggtgaaatattattttggtcgggtatggtggtttacgtttgtaattttagtattttgggaaatcgagatgggtggattatgaggttaggagtttaagattagtttggttaatatagtgaaattttatttttattaaaaatataaaaaattagtggtgcgtggtggtgggtatttgtaattttagttatttgggaggttgaggtaagagaattgtttgaatttgggaagcggtggttgaagtgagtggagatggtattattgtattttagtttgggtgatagtgcgagatttttttttaaaaaaaaaaaaaaaaaagaaaagaaagttttatttttattaaaaatataaa

SEQ ID NO: 17 - DNA, 5310 bp, Artificial Sequence
  chemically treated genomic DNA (Homo sapiens)
aaaaaaaaaaaaaaaaaaattagaaaattaaaaaattaggtcgggtgtagtggtttatgtttgtaattttagtattttgggaggtcgaggtgggtagattatttgaggttaggagtttaagattagtttggttaataaggtaaaattttatttttattaaaaatataaaaattagttgggcgtggtggtattcgtttgtggttttagttatttaggaggttgaggcgggagaatcgtttgaatttaggaggcggaggttgtagtgattttagatcgtattattgtattttaatttgggcgatatagcgagattttattttaaaaaaaaaaaaaaaaattagttaggcgtgatggtatatatttttatttttaattatttgggagggtgaggtgggaggatcgtatttgagtttgataggttgaggttgtagtgagttgtgattatgttattgtattgtatttttgttggggtgatagtaagattttgttttaaaaaaaaaaaaaaaaaaagtttgattgttttagatttattttataatgattaatttgaattaagtcgttttattttttgtttggataattgtaatggagtttttattagtttttttgttttttttgttttttataatttttttaatattatttttttgtttaaaattaatagtggttgttttttttggttttttaagtaggggttaaagtttttataatggtttatatgttttataaggtgtgattttggtttttttatattttgatttattttttatttgttttttttattttagttatattggtttttttgttgttttaagtaatttattgtttcggggtttttgttttgttttttttgtttggaatgttttttttaaagcgtggtttttttattttttttaagtttttgttttaatgttattttatgagtaaggtttttgggtttttttgtttgtttttcgagtttttattattttttgtttttttgtgttttgttttgagtttggggagaatgatttttttagaaagtaatttgggtttttttgttttaggtttttgagtgggtttggtgaatgggaggtgttattaggagatgaaaggtaagaggggagagatgttggggtattttttttttttgtattttttttgttttgttttgggtagtggttgtgtttttttcgattatagttgtatttgggaatggattttatatttttttgtttttttatttacggatttttaataatatgattttttttttgatttttagtttttaaagtagttatgttttttagtttttgtttgtttttttggtgttttaatatttttgttgtttgggttttttgaattttgtttatttttttcgttttttttttaagatttgaatttttcggttgggcgtagtttttaacgtttgtaattttagtattttgggagatcgaggcgggtagattgtttgaggttaggagtttgagattagttcggttaatatggtgaaattttgttttaattaaaaatataaaaattagttggggatggtggtaggtatttgtagttttagttattcgggaggttgaggtaagagaatcgtttgaattcgtgaggcggaggttgtagtgagtcgagatttcgttattgtattttagtttgggtatggtagcgagatgttttaaaaaaaaaaaaaaaagtgtagttgttatggaaaatagtatggtgtttttttaaaaaataaagtaggttggagtgtagtggtgtgattatagtttattgtagttttaattttttgggtttaagttattttttcgttttagttttttgagtagttgggattataggttcgtgttagtaagtttggttaatttttttttttgtattttttgtagagataggggtttcgttgtgttgtttaggttggtgttaaatttttgggtttatttatttattttagttttttaaatgggattataggcgtgaattattgtttattgcgtcgggtttttttgtttttgtttttgtatacggtatatgttattatttaatatattatatttttacgtatttttttatttttttttattttttatattttggatggtaagttcgaaggcgtagggatgtttgtttattgttgtattttaagtggttggtatatcgtcggttgttagtaaatgtttttgaaatgaatgaatgagtgaatgatcgataaggggagttaaggggaaggtagcggtgcggttcgcgtcgtaggtagaagagttgattttttaattttcgttttttttttcgttttcgttcggaatgttgagtgttcgagaaggaggcggaaatgagcgcgtttaatagtttattagtcgggtgtttatttaattagggtttgtatttcgaggttcgtttgtgtttaatcgttcgtttaatggtttcgtttggtttcgggcgggcgcgggggaatttgcgaggcgagcgtaggtttggttattttgtttcgtcgggggtttattttattgcgtcgcgcgggtgcgcgtagatttgattttttttcgggtataaaaagcgttttgcgggagatttaggtcgggagggcgcggagtttagcgagtagttttaggtttttttaatcgcgtggtttatttttagttttagttttagttttagttgttgggtttattcgtcggttaagggaatgttttcgagatattagatgttagttgttcgttgtatttttagttatgaaattggaggattataacgttttttatttttttaatttaggggatgtggggatgttagaaagagagacggttcgttagatatttgagagtaataatattaggtagtatttgggtatttgttgtgtgttagatatgatgtttagcgttttaaattttttaatttatttaatatttatttatgagagggtaaaatattaagattataatagttttatttgatagatgtagaattgaggtttagggggtttattttattttttcgaggttttagcgttattaaggggtgggatttggatttgaatttaggtggggtcggttttaagggtttatgttaggtttgagagagtaagatttttattttcgtaacgtaagtaatttatggtttagttataggtttggcggggaggaggacggatagattattaggttagttttggaaggttaaagaatttgttatttaaaattttaggttgggtttcgttttttacgtttgtaattttagtattttaggaggttaagggaagcggattatttgaggtcgggagttcgagattagtttggttaatatagcgaaatttcgtttttattaaaaatataaaaattagtttggtgtggtagtgggcgtttgtagttttagttattcgggaggttgaggtaggagagtcgtttgaatttgggaggcggaggttgtagtgagtagagatgacgttatcgtattggacgatagtgagattttattttaaaaaaataaataaaataaaaaaatttttttagtttttagttcgttttttaaatttttaaatttgagttggggacggggagggagaaggattaggaggtggtatttagggttttttaaggtagtagtagaaggtgaaggaggagtgaggggataggtgagagagattgatcgggaaagtttagtttcgtggggaagggtttgtggggtagtgattgagatttaggatcgtttttatggttagagtttatttgtgtgtagtaagaggaaagtatttcgtgtttaacgtagtggaatgagagtaacgtagaagaataacgaattttaggtttggcgtttattttttaggaagggtgtgggagagttgttttttaagggagattttttggaggttgttttgcgtagtaagtagtttttatttagattatatatagtattttagattaattttaaaatttttgcgttttaaaaattgtttttatttatattttatagaaagttgagaaagtgttatttatatggggggtaggggtgttggagattatgagattaataataatttttttagttcgtattttttggtattattatagtttttaaattttgggattttttcgattagtttttttttgtttagttgtgaaatggaagaagcggttcgggtgtggcggtttatgtttgtaatttgagtattttgggaggcggaggatcgtttgagtttagaagtttaagattagtttgggtaatatagggtgattttttatttttttttcgttttattatatcgttataaaaaatttttaaaaattagtcgggtgtggtggcgtaagtttgtagttttagcgggagttgagggaggagaatcgttttagttcgggaggtcgaggttgtagtgagtcgagatcgcgttattgtatttttgggcgatagagcgagattttgtttttaaaaaaaaaaaaaaaagaaaaaagaggaagttgtatttaatttagaaacgcggtttttcgggatttgttagttttatatttcggaggatttttttcggcgggttggtacgggaggtggagaaagaggtttgggcggtttcgttgtagtcgcgtgtgggaggacgtacgggtttgttttaaagttttgggataatagcgttttcgggggataatgaatgcggagttttcgtttttagtcgattttagatgtgtttttattttttttcgttgtagtcgtaaggtaaggaaatattttttttttcgtattgaggaggttgaggagtgtattgggtgttttttttttttttaatttagaattgcgagatagaggttgagtttttgtaaagaatagttttagaaaagttaggagagcgtaggagggtattcgggaggttaggaggggttcgttggggttttaatcgtatttatatcggttttatttgcgagggggcgggatttcgtggcgttggattaattagtatttatttgcgtttatttggttttttttcgttggttttcgggggttgcggtgtttaaaggggtaagagttgagcggaatatcggttcgtcgtcgcggtagttgttttatttttttttttgtagttatggggttttttcgtggatttttcgcgttttttttttttttttaggtattttatagtttcgtcgtggtttcgatcgggatcgttttttggggggcgggcggggttcgtatggggtagtggcgtcggggagagcgcggggttgcgttttttggggttaagggagtttcggaaggttcgtgaggattttgcggtgtggggagtgtagggtcgggtacgtttggatttagttttttttattttttgttttcgggcgtagg

SEQ ID NO: 18 - DNA, 5310 bp, Artificial Sequence
  chemically treated genomic DNA (Homo sapiens)
tttgcgttcgagggtagagagtgaaggaggttgggtttaggcgtgttcggttttgtattttttatatcgtagggtttttacgggtttttcgggatttttttggttttagggagcgtagtttcgcgtttttttcgacgttattgttttatgcggatttcgttcgttttttagggagcggtttcggtcggggttacggcgaggttgtggagtatttggagaaggaggagagacgcgagaggtttacgagggagttttatggttgtagagagaggggtgaagtagttgtcgcgacggcgggtcggtgtttcgtttagtttttgtttttttgagtatcgtagttttcgggagttagcgggaggaggttaggtgagcgtaggtgggtgttgattggtttagcgttacgaggtttcgttttttcgtaggtgggatcgatgtgggtgcggttgaggttttagcgaattttttttggtttttcggatgtttttttgcgtttttttggtttttttggagttgttttttatagggatttagtttttgtttcgtagttttgggttagaggagaaaagaatatttagtgtattttttagtttttttagtacgggaagagaaatgtttttttgttttgcggttatagcggaaaaaagtggagatatatttgaagtcgattgaaaacggaggtttcgtatttattatttttcggaggcgttgttattttaaagttttgaagtaggttcgtgcgtttttttatacgcggttatagcggggtcgtttaagtttttttttttatttttcgtgttagttcgtcggggaggatttttcggggtataaaattagtaggtttcgaaggatcgcgtttttgaattggatataattttttttttttttttttttttttttttttggagatagggtttcgttttgtcgtttaggagtgtagtagcgcgatttcggtttattatagtttcgatttttcgggttgaagcgattttttttttttagttttcgttgagattataggtttgcgttattatattcggttaatttttaaaaattttttgtagcgatgtggtggggcggggggagggtggagggttattttatgttgtttaagttggttttgaatttttggatttaagcgatttttcgttttttagagtgtttaggttataggtatgagtcgttatattcggatcgttttttttattttatagttaaataaagggaagttagtcgagaaagttttagagtttggaagttgtagtggtgttaaagggtgcgagttaagagggttgttattagttttataatttttagtatttttattttttatataaataatatttttttaattttttgtaaaatgtaaataaagataatttttaaaacgtagaggttttgaaattggtttgaaatattgtatataatttgggtaaaaattgtttgttgcgtaaagtagtttttagagagttttttttggaaaatagtttttttatattttttttaggagataaacgttagatttgggattcgttgtttttttacgttatttttattttattacgttagatacgaagtgttttttttttgttgtatataagtgggttttggttatgaaaacggttttgagttttaattattattttataagtttttttttacggagttgagttttttcggttagttttttttatttgtttttttattttttttttattttttgttgttgttttgagaagttttggatgttattttttggttttttttttttttcgtttttagtttagatttaggggtttgaggaacggattggagattggagaggtttttttgttttgtttgtttttttgagatggagttttattgtcgtttagtacggtggcgttatttttgtttattgtaattttcgttttttaggtttaagcgatttttttgttttagtttttcgagtagttgggattataggcgtttattattatattaggttaatttttgtatttttagtagagacgggatttcgttatattggttaggttggtttcgaattttcgattttaagtgattcgttttttttggttttttaaagtgttgggattataggcgtgagaaacggggtttagtttggagttttaaatgatagattttttgattttttagggttaatttggtaatttattcgttttttttttcgttaggtttgtggttaagttatggattgtttgcgttgcgagggtgggggttttgtttttttaggtttagtatgggtttttaaggtcggttttatttgggtttaaatttaggttttattttttagtagcgttgaagtttcggggaagtaaaataaattttttgggttttagttttgtatttgttaaatggggttgttatgattttagtattttatttttttatagatgagtattaaataaattagaaggtttaaaacgttaaatattatatttggtatatagtaagtgtttaaatgttgtttggtattattgtttttagatgtttggcgagtcgtttttttttttagtatttttatattttttgaattaagagaatgagaagcgttgtaattttttaattttatggttgagggtataacgagtaattggtatttggtatttcgggagtatttttttagtcggcgggtgagtttagtagttggggttgggattgaggttgggggtggattacgcggttgggaaagtttggggttgttcgttgagtttcgcgttttttcggtttggatttttcgtagggcgttttttatgttcgaggggaggttaggtttacgcgtattcgcgcggcgtaatggagtgggttttcggcgggatagggtggttaggtttacgttcgtttcgtaggttttttcgcgttcgttcggagttagacgaagttattaggcggacggttaaatataaacgagtttcgggatgtaggttttaattaagtaaatattcggttggtgggttgttgagcgcgtttattttcgtttttttttcgggtatttagtatttcggacgggggcggagagaggagcggagattggagagttagtttttttgtttgcgacgcggatcgtatcgttgttttttttttagttttttttgtcggttatttatttatttatttattttaaaaatatttgttgatagtcggcgatgtgttaattatttaagatataatagtgaataaatatttttgcgttttcggatttgttatttagagtgtggagggtagaggaaagtgaaaaaatacgtggaaatataatatgttagatggtaatatgtatcgtgtataagaataaggataggggggttcggcgtagtgggtagtggtttacgtttgtaattttatttagaaggttgaggtgggtggatgagtttaggagtttgatattagtttgggtaatatagcgagatttttgtttttataaaaaatataaaaaaaaaaattagttaggtttgttggtacgggtttgtagttttagttatttagaaggttaaggcgggaggatagtttgagtttaggaggttgaggttgtagtgaattatgattatattattgtattttagtttgttttattttttgaggaaatattatattgttttttatagtaattgtatttttttttttttttttgagatatttcgttgttatgtttaggttggagtgtaatggcgagatttcggtttattgtaattttcgttttacgggtttaagcgatttttttgttttagtttttcgagtagttgggattataggtgtttgttattatttttagttaatttttgtatttttagttgaggtagggttttattatgttggtcgggttgattttaaatttttgattttaggtaatttgttcgtttcgattttttaaagtgttgggattataggcgttagagattgcgtttagtcgggaggtttaagttttaaggaagggacgagagaaatgggtagggtttagggagtttagataataggggtgttgaggtattagagagataaataaaagttggaaggtatgattattttgagaattgaaggttagagaggaaattatgttattggaagttcgtggataaggggatagggaagtgtgggatttatttttaaatgtagttgtgatcgaggaaggtatagttattgtttagagtagagtagagaaagtgtagggaaaaaaaatattttagtatttttttttttttgttttttattttttggtggtattttttatttattaaatttatttagaagtttgaggtaagaaagtttaggttgttttttagaggggttattttttttaggtttaggatagggtatagaagggtagaaaatgatgggaattcggagagtaaataagaaagtttagaggttttatttataaagtggtattagaataaagatttgaaggaagtgaaggaattacgttttggaaagagtattttaggtagagaaaatagggtagaggtttcgagatagtagattatttggaatagtaagaaagttagtgtggttggagtagagagagtaagtaggaagtgagttagagtatgggagggttaggattatattttgtagagtatgtaggttattgtaagaattttggtttttatttggggaattaggggaggtagttattgttggttttgagtagaggagtgatgttgagaaaattataagggataagggaagtagggaggttggtgggggttttattgtagttatttaggtaaaagatgaaacggtttggtttagattggttattatggagtgggtttgaaatagttagattttttttttttttttttttgagatagggttttgttgttattttagtaggggtgtagtgtagtggtatgattatagtttattgtagttttaatttgttaggtttaagtgcgatttttttattttatttttttaagtagttggaaataaaggtgtgtgttattacgtttggttaatttttttttttttttttgagatggagtttcgttgtgtcgtttaggttagggtgtagtggtgcgatttgggattattgtaattttcgttttttaggtttaagcgattttttcgttttagttttttgagtagttggggttataggcgggtgttattacgtttagttaatttttgtatttttaatggagatggggttttgttttgttggttaggttggttttgaatttttgattttaggtgatttgtttatttcgattttttaaagtgttgggattataggtataagttattgtattcggtttaattttttaattttttaattttttttttttttttttt

SEQ ID NO: 19 - DNA, 6050 bp, Artificial Sequence
  chemically treated genomic DNA (Homo sapiens)
tatttttttttgttaaaaagttaagagttgtttagaaggaaaaaatagttttttttaaagaggttaaatttttagtattaattagttgtagtagtggtatgtgtgtgtgtgtggggggggggtggtatggtaattttgtgtttttagtgttttaaataggggtaatttttttgtttacggtttgagttatcgaatgagtaatttcgattttttaagattttttattgggtttacgtgtgtgtgagttttataggaattgtggaatgttttttttttttgttgggtttagatatttagaatgaataaattaaagggtagtggtaatatggttattgttattgtagataatgtggtatttatatatgggtattagttgttttttttatggggtttaggaataagggtaagtttgattttttattatgaattattggggtgttttttatatatagaggttgtattagttgaaaatagtttaaatattttgtaattttgttttttttaatttttgtttatttatattttagaataaaagagtttgtttagtttttttaaagatttaaagaatattatttatttgttttttaagtatttaaaaagtataatcgtttatatttattttggttggatgaggatatgtatttatttatttatttaagagatatttattgttagatttggtggtttacgtttgtaatttcggtattttgggaggtagaggtgggaggattatttgaggttaggagtttaaggttagtttgggtaatatagcgagattttatttttataaaaaataaaaaattagttgggtatggtggtatgtgtttgtggttttagttatttgggaggttgaggtaggggtattgagtttaggagtttaaggttgtagtgagttataattatattattgtattttagtttgggtaatagagtgagattttgttttaaaaaaaagaaagaaaaagaaaaagaaaaggggtatttattgaatatttattatgttttaggtattgtgttagattttaagtgaatattagtatatgaataagataaaggcgaaaagttattaaataagtttaagttgatttcggtatatgtatttttttgatttttggtttcgtgttttgattataattttttattattagattagatttttttaaataaataattatttttgtatgttggggatgggttgtgtgcggtagtatttacgtaggcggtatagatagtagttttttatttaatgttgtaataatattaggttaaataatgtgtattgattttaaaagtgtggggttaggttttttttaagtgttatagggagagtgtaaagtaggaaaagtttatcggatgaggaaatattgtagagggaaagtgaatttttttttaatttgggttaaaatttagatgtggaattttatttttttttttatttttggatttttagataggaggaatttagtatatagataattatgaattatatatattttggttttatatgtttagatttgtttagagtatgaaatttttgttttgttggaaggtagcgtcgtgtttacggaggtatataagtatttgttttaaagttattttgatttgtagatttgtaaatggtaaaaataattttatatgtttgttttgatttgtttttatttttaggttattttgtgtgagttttattttttagaatgtgattttgtagttttgaaatggatattatgagtagattgagatgtgagaatatgttagaatgattataggttcggatgttagtggggtaggagagggagtttgagattgtattggtttatattgtggtttttggttgagtatttggtttgtttggatgatgttttggttttatttaatttttattattttattatttagaggatagaggatttgagttttatttttgtattgtagttattttttttgggatttgtttttaagtttttttttgtgttgtttggtattttttttttattttttttaaattatttattgttattttgtaagttcgattgatttgttggtttttttatgagattggaatttttttgagggtcgggataggtttattttttttattatagtgagtattagtttttagtttagttaatagttttgttaaataaataattgaataaaattatttgttaaataatggtttgttttttttagaggatggatttagtttgttttttttagaggatggatttagtaagtttttaattttggttataatggtgttagaaggaaagagttaagttatttggaggaaataggtttatttaaagatttttttttttttttttttttttaattggtaaaggtaggataagtgtatttgagataaattttggatataaaattttgatatattttttaggtattggtcgagatgttttggatttgaaagggaagtaaattaaattattttaggtttttttttttttttttttggagatagaattttgttttgttgtttaggttggagtgcggtggtacgatttcggtttataggaatttttgtttttcgggtttaagtaatttttttgttttagttttttgagtagttgggattataggcgtgcgttattatattcggttgttttgtatttttagtagggatagagttttattatgatggttaagttggtttcgaatttttggttttaagtgatttattcgtttcgggtttttaaagtgtaggaattataggagtgagttatcgtatttagttaggttttttgttaagtggtttgagatttagttgtgaatggtagttatggttagatttaggaatttaaagtttgatttattttgtttgaagttaatattaataataagagagatgtatttggttttataatttttttttttttcgtttttttttttttttttgtaattaaggatagaattagaagtatcgaaggtcgtagaattgttttaggatttagagtagttttaaggaatttgtgtttacgtattatgtgtgttttttcgtttttttttttttttatgagtgagaaaaaaaagcgtttaaatttttattaatataaattaatgatatataatgatgaaattttgtttttatttttgtttgtgatagggaatgtaaaaatagtaagtggtttagttttacgaattttcgttttttgtttttttcgtttttgtcgggttggatttttaagaatggaggttagcgtatagtttcgcgcgggtcgtttagttttcggattcggcggatgatgttaggcgacgggagcggtcgcggtcgggtcggggaggtcgcggtttaggggagttgggagggagggtggtttcgttaggtcgacggcgcgttcggtcgcgcggcgttgtttggagacggttttggcggcgttgtgttgttgtaaatagtcgtttttttgttattatttatagtaggattttttggttttcgggcgcggcggttggaggtaggtttgcggttcggtttttcgcgcgtttcgaattattcgttcgtcggttttattttgtttcgtttttttttaggtgtttatcgcgggtttcgattttcgggttcgaagagtggagaagggaagatcggggttgtgcggggatatgcgttttcgcgttttggaggtggttagcgcgttggggttgagtttcggtagcgtgatttcggttgttttacgtagtagggtaggagattggggggcgtggtatattttggagtattttgtttttttaaagtttcgtgttttaggacgtggagtcgtttttggggttttagtagtcgaggtatttcgtttaggcgtagttggatattgtttttttagttttcgttttttattttttaagttcgcgttggaaaattattcgttgcgggttttcgtaagtatagttttttggcgggatcgaattagtttttagcgtagatttgagtttttcgtaggaagtatatttcgttttgttatttcgaattgattattttgtttatataattatatttcgtattttttatttttggggtttagtttagaatcgggtagatattttttttaaatgttttcgtacgtaggttttgtatagtgtttatttgttggtgttttagggatttgatagtttttttaatatttttatatatggtcgagaaaaataaataaataaatgcgttgttttttttaaaaaaataaataaataaagtatttagtatcgtaaagtaggttatcgtatttttttattttggattttttattttttgtttttaaacgtaggaatagtgttagtattgttcgagttcgagggttggaggttaggggatgaaggtttgtttttacgttttgtattgaattagggttagaattggggatgggggtaggggcgtattttttcgggagtcgaggtttaagttttcggggttttgtattcgatgtcgttttttttatttttgagttttagaattgtttttagttttcgtataagggtaaaaaggcgttttttgttttatttttttcgatttcgggaataagggttcgtattgaattaggtgcgaatgtttttttttattttgcgtcgttttcgtttttttttttttagtcgcggttttcgttttttttcgtattgtattttcggtgttggttgtagttcgcgagtagttttcgttaatttttttttttttatataggatgtttatattaggatatttgcgttagtaggtttttacggtttttttttgtagttttggggggagttattttcgaaattttttattttggggggtttacgagatttttgagataggaattgcgaaatgtttacgagattaggatacgcgttaaggcgggggtagggagttgcgagcgttggggacgtagtcgggcggtcgtagaagcgtttaggttcgcgcgttatttttttggcgttatcgtggttgagttcgtgacgtttatatttatttataaaacgtttgttataaaagtagtggttgcggcgtttcgtattttaatcgtatttgtagcgagtatttgagaagttaagattgagtcggcggtcgcggcgtagcgaacgagtagtgatcgtgtttttatttagttttgttttatagcgtttatttgttttcgtttttcggtttttcgttcggttttgtttaatcgttacgatgatgttttcgggttttaacgtagattacgaggcgttattttttcgttgtagtagcgcgttttcggtcggggatagttttttttattattatttattcgtagattttttttttagtatgggttcgtttgttaacgcgtaggtaaggttggtttttcgtcgtcgcggggtcgggggtttggggtcgcggaggaggagatatcgggcgggacgttttagtagatgagtagggggtttttttgtgtttggagggaggttgtcgtggtcggagcggtgtcggttcgggggttcgggatttgttttgagcgtacgtacgtttgttatagtaagaattggtttttttttcgggaggtaggttcgttttgagtaatttttggtttgtattttaggacggatttttgatattagttggagtagacgtgttttaagtataaattcgttaattagagtttggttttttcggggaggtggtagaaagcggtaattttttttttttcggtagtttggagtacggaggagggatgagggaggagggtgtagcgggcgggtgtgtaaggtagttttattgataaaaagcgagtttattttggagatttcggagcggcgtttgcgttagcgtagacgttagggatatttataataaatttttttttaagtaagtgatgttgaagggataacgggaacgtagcggtaggatggaagagataggtattgcgttgcggaatgtttgggaggaaaagggggagattttttatttaggatgagggatatttaagatgaaatgttcgtggtaggatcgtttttttttattgttgtatgcggtattgggaattcgttttatttgtgttcggaatttgttcgtttacgtcggttttttttttttgttttgttttagg

SEQ ID NO: 20 - DNA, 6050 bp, Artificial Sequence
  chemically treated genomic DNA (Homo sapiens)
tttagaataaaatagaaggggaaagtcgacgtgagcgagtaggtttcggatataggtggggcgagtttttagtgtcgtatgtagtagtgaagagaaacgattttgttacggatattttattttaaatgttttttattttggatgaaaggttttttttttttttttttaggtatttcgtagcgtagtgtttgttttttttattttgtcgttgcgttttcgttatttttttagtattatttgtttgaaagggggtttgttataaatatttttgacgtttgcgttgacgtaggcgtcgtttcggagtttttagaatgaattcgttttttattaatgaaattgttttatatattcgttcgttgtattttttttttttatttttttttcgtgttttaggttgtcgggggaggggggattgtcgttttttgttattttttcggagaagttaggttttagttagcgagtttgtgtttgggatacgtttgttttagttaatgttagagattcgttttggagtgtagattagaggttgtttagaacgaatttgtttttcgaagggggaattaatttttattatggtaagcgtgcgtgcgtttagagtaagtttcgagttttcgagtcggtatcgtttcggttacggtagtttttttttaggtataagggagttttttatttatttattggagcgtttcgttcggtgttttttttttcgcgattttaagttttcggtttcgcggcgacgggaagttagttttatttgcgcgttgataggcgagtttatgttggagaaggagtttgcgggtgagtggtagtaagagaggttattttcggtcggggacgcgttgttgtagcgggaggatgacgtttcgtagtttgcgttgaagttcgagaatattatcgtggcggttaggtaaagtcgggcgaggggtcgaggggcggagataggtgggcgttgtggagtagagttgggtaggagtacggttattgttcgttcgttgcgtcgcggtcgtcggtttagttttggttttttagatgttcgttgtagatgcggttggagtacgaggcgtcgtagttattgtttttataataagcgttttatgaatgagtgtaaacgttacgggtttaattacggtggcgttagaggggtggcgcgcgggtttgggcgtttttgcggtcgttcggttgcgtttttagcgttcgtagttttttgttttcgttttggcgcgtgttttaatttcgtgagtatttcgtagtttttgttttagaggtttcgtgggttttttaagatgaggggtttcggggatggttttttttagggttatagggaaaggtcgtggaaatttgttgacgtagatgttttaatatggatattttgtgtaaggggggagggattgacgggaattgttcgcgggttgtagttaatatcgagggtgtagtgcggggggaggcgggggtcgcggttgggggaggggaggcgggaacggcgtagaatgagagagaatattcgtatttggtttaatgcggatttttgttttcgaggtcgggggggatggggtagagagcgtttttttatttttgtacggaaattgaagatagttttgaggtttagagataggagaaacggtatcgagtataggatttcgaggatttaagtttcggttttcgaaggaatgcgtttttatttttatttttaattttagttttaatttagtgtaaagcgtggaagtagatttttattttttaatttttagttttcgggttcgagtaatattagtattgtttttgcgtttggaagtagaaagtggaggatttaaaataagagaatacgataatttattttacgatattgggtattttatttatttatttttttaaagaagatagcgtatttatttatttatttttttcggttatgtgtgggaatattaaggaaattgttaaatttttgagatattagtagataaatattgtgtaaaatttacgtgcgaagatatttgaagggggtgtttgttcggttttgagttgggttttaggggtagggagtgcgaggtgtggttatgtgggtagggtggttagttcgggatgataaggcggggtgtgttttttgcggggaatttaaatttgcgttgagggttggttcggtttcgttaggaagttgtgtttacgggagttcgtagcgggtgattttttagcgcggatttggagggtggaggacgggggttggaaggatagtgtttagttgcgtttgggcggaatatttcgattgttgggattttaggagcggttttacgttttggaatacggggttttggggaggtaaggtgttttagagtgtgttacgttttttaattttttgttttgttgcgtaggatagtcggggttacgttgtcggggtttagttttagcgcgttggttatttttagggcgcgaagacgtatgttttcgtatagtttcggtttttttttttttatttttcgggttcgggggtcggggttcgcggtgggtatttggagaggggcgaggtaggatgaggtcggcgggcggatagttcggggcgcgcggggagtcggatcgtagatttgtttttagtcgtcgcgttcgggagttaggagattttgttatagatagtaatagggaagcggttgtttatagtaatatagcgtcgttagggtcgtttttaggtaacgtcgcgcggtcgggcgcgtcgtcggtttggcgaggttatttttttttttagtttttttgggtcgcggttttttcggttcggtcgcggtcgttttcgtcgtttgatattattcgtcgggttcgggggttgagcggttcgcgcgaggttgtgcgttaatttttatttttagagatttaattcggtaggagcggggagggtaggaggcggggattcgtggaattgggttatttgttatttttgtattttttgttataggtagaggtgaaaatagaattttattattgtatgttattggtttatgttggtgggaatttaggcgttttttttttttatttataaaaagggagggaaacggaaaaatatatataatacgtaaatatagattttttggagttgttttgaattttaaagtaattttgcggttttcggtatttttaattttatttttgattatagaaagaaagagggggacgggagggaaaggggttatgaagttaaatatattttttttattattaatattagttttagataaaataggttaagttttgaatttttgagtttggttatgattgttatttataattagattttaggttatttaataggaaatttgattgggtgcggtggtttatttttgtaatttttgtattttgggagttcgaggcgggtggattatttgaggttaggagttcgagattagtttggttattatggtgaaattttgtttttgttaaaaatataaaatagtcgggtgtggtggcgtacgtttgtagttttagttatttaggaggttgaggtaggagaattgtttgaattcgggaggtagaggtttttgtgagtcgagatcgtgttatcgtattttagtttgggtaatagagtaagattttgtttttaaaagaaaagaaaagaaaatttagaatgatttgatttattttttttttaggtttaaagtatttcggttaatatttaaaagatgtgttaagattttatatttaggatttattttaaatatatttattttgtttttgttaattaaaaaaaaaaaaaagaagaagggtttttgagtgagtttattttttttagatagtttaattttttttttttggtattattatgattagagttggagatttattaaatttattttttggaaaggataaattaagtttattttttggaaaggataaattattatttaataaataattttgtttaattatttatttaataaaattattgattgggttggaggttggtgtttattgtaatgaagagggtaggtttgtttcgatttttagagagattttagttttataggaagattaataagttaatcgagtttatagggtagtagtaagtggtttgaaagaggtaagaaaggggtgttaggtaatatagaagaaggtttggaaataggttttagaggaggtgattgtaatatagagatggggtttagattttttgttttttggataatggaatgataaagattgagtaaggttagagtattatttaggtaaattaagtgtttaattagaagttatagtataggttaatataattttagatttttttttttgttttattaatattcgaatttgtgattattttaatatatttttatattttaatttgtttatggtatttattttaggattgtaaaattatattttaaaaagtggagtttatataaggtagtttaaaaatgaagataaattagaataaatatgtgaaattatttttgttatttgtagatttgtaggttagggtgattttgagataggtgtttgtgtgttttcgtgagtacggcgttgttttttaatagggtagggattttatgttttggataagtttgagtatataaaattaaaatgtgtgtagtttatgattatttatgtgttgagttttttttatttggggatttaaaagtgaaaaggagggtagaattttatatttgaattttaatttaaattgaaaaaaaatttattttttttttatagtgtttttttattcgatagattttttttattttgtattttttttgtggtatttgaaggagatttgattttatatttttgaagttagtgtatattgtttagtttggtgttattgtaatattaagtgaaaggttgttgtttgtatcgtttacgtaaatgttgtcgtatatagtttatttttagtatgtagaagtagttgtttatttggggaagtttggtttagtggtgaagggttgtggttaaagtacgggattagaagttaggaagatgtatatatcgaaattaatttagatttgtttggtaatttttcgtttttgttttgtttatgtgttgatatttatttaggatttagtatagtgtttgaaatatagtaggtgtttaataaatatttttttttttttttttttttttttttttttttgagatagggttttattttgttatttaggttggagtgtagtggtgtgattatagtttattgtagttttgaatttttaggtttaatgtttttattttagttttttaagtagttaggattataggtatatattattatgtttagttaattttttattttttgtagagatggggtttcgttatgttgtttaggttagttttaagtttttggttttaagtgatttttttatttttgttttttaaagtgtcgagattataggcgtgagttattaggtttggtaataaatattttttgaatggatgaatgaatgtatgtttttatttagttaaggtgaatgtagacggttgtgttttttgggtatttagaaagtaaatagataatgttttttaaatttttggaaaggttgaataggtttttttattttgggatatgaataggtaaaaattgggaaagataaaattataagatgtttgggttatttttagttggtatagtttttgtgtataaagaatattttagtggtttatgatgaaagattaaatttatttttgtttttgagttttatgagaaagatagttagtgtttatatataaatattatattgtttgtaatgataatgattatgttattattattttttaatttatttattttaaatgtttggatttaataagagaaagaggtattttataatttttgtgggatttatatatacgtgagtttagtgaagggttttaggaggtcgaggttatttattcgatggtttagatcgtgagtaaaaagattgtttttatttagaatattggaggtataagattattatgttattttttttttatatatatatatatgttattattgtaattaattagtattagagatttagtttttttgagaaaaattgttttttttttttgaataatttttggttttttgataggagaggatg

SEQ ID NO: 21 - DNA, 4501 bp, Artificial Sequence
  chemically treated genomic DNA (Homo sapiens)
ttagggagtaaataaattatgtgtggggttgggtaattagttgagtcgaagcgtaaataaaatgtgaatatacgtttgcgggttatatatagtgtatttttattagtatttagaaaaaattgtgagttagtgaattaggaaattaatgtttggaaggtagttaaattttaattagtttaagatttttttttttttttaaaaaaaggtacggaagtaatatttttttttttttttttgattagaatcgatgtattttttgtgtatgatcgtatttttaataataaaaggggaaagaggatttggaaaggaattaaacgttcggtttgttcggggaggaaagagttaacggttttttttataagggtttttgttgattttttcggttcggtttataagttttttatttgttttttttaggaagttcggtttcgcggttcgggtattttttgttttttttatattttttcgtttagtatttttgattttttttaaattcggtagttcgagattgttgtaaatcggcgttatagggcgtaaaggggatttgttttttttgaaatttggttgagaaattgggaatttcgtgtgggaggcgtgggggtgggacggtggggtatagattggtagagagtaggtaatttttttttcgttttagtttagttttggaataggtagatatattttagggttaaatagacgtttttcgtacggggttttacggaagtttgagtaggcggggtaggaggggcggtatttgttgttttggtagtaaattgggggatttagtttgggtggaaggtatttaatttagatagttgtgtatatataatgtataatatatgattttttttaataaatgtaatgggagtttatttataacgcgttttttaagtatacgtggtaatgcgttgttgggttattttaattattttaggtatcgtttttttttttatgtttttattatttttttttatttatattaatattttacgttttgaacgcgcgtttattaatattttttttttttttattttttttgggatttttgattaaagcgcggttttttttttagttttagcgaggcgttttgtagtttggtacgcgcgtggcgtggcggtgggcgcgtagtgcgttttttgtgtggagggtagttgtttcgtttgcgatgatttatatttataggataaggatgcggtttgttaaatagtattgttacggaggagtagtagagaaagggagagggtttgagagggagtaaaagaaaatggtaggcgcgcgtagttaatttatgcggtttttttattttgtttatattttagagttagagtgttcggttgttcggttgagttttttttttattttttttattttttttattttttttataagcgtttttttcgggtttttaaagtagagggcgtgggggaaaagaaaaaagattttttttcgttaattttcgtttatcggttttttataatgcgagggtttggacggttgaggattttcgagttgtgttgttcgcggtcgttatcgtcgggtttcggtcgtttttggttttttttttgtttcgagaagggtagggttttttagaggtttggcgggaaaaagaacggagggagggatcgcgttgagtataaaagtcggttttcggggttttatttaattcgttgtagtaattttagcgagaggtagagggagcgagcgggcggtcggttagggtggaagagtcgggcgagtagagttgcgttgcgggcgttttgggaagggagattcggagcgaatagggggtttcgtttttggtttagttttttcgttgattttttagttagcggttcgtaatttttgtcgtatttacgaaattttgtttatagtagcgggcgggtattttgtattggaatttataatattcgagtaaggacgcgattttttcgacgcggggaggttattttgtttatttggggatattttttcgtcgttgttaggattcgtttttttgaaaggttttttttgtagttgtttagacgttggatttttttcgggtagtggaaaattaggtaagtatcgaagtttatttgttttttaatttatttttttattattttaatgttgagatgagtcgaatgtttaaatagggtgtttttttttttatttttgcgttattgatattttttttagagtagttatggtaattggggttggggtggggggtaatttagaattggatcggggtaaagtgatttgttaagatgggagaggagaaggtagagggaaaacgggaatggtttttaagattattttttcgagatttttgttttatgaatatatttacgttgattttcggtcggtcggatatttttgttttattgtgttaattgttttttgggttttggggggttgggggttgttttgcggtgggtagaaagttttttgtattttgagttttttggagtagggatcgtatatcgtttgtgtgagttagatcgtttcgtagtcgttgatttgttttcgttttcgggagggtatttaaatttcggtttatcgtatttttgatagtcggagacggatattgcggcgcgtttcgttcgtttgttttcgcggcgattttaattcgttttgatttttttaagaagttggtatttggttttttaaaaagtaataatataatttaaaatttgggtttttagaggtgttaggacgtggtgttgggtaggcgtaggtaggggaaaagggaggcgaggatgtgttcgatttttttggaatcgttgatttggaaaaattagggcgaattttcgtatttagttttgatttttttgtcgcggtcgttttcgggtgttttcgcgttcgagatgcggaggaattgcgaggagcggggttttgggcggttttagaatagttgttatttttggtggggtggtttcgggggaggtatcgtagcggggtttttggcgtagttgtattttcgtattgagtgcgaagggaggtgtttttattattatttgatattttttttgtatttatggaggggtgttaaagttcgcggttgagttcgttattttagtcggcgagagaaagaagaaaagttggtaaaaggagtgttggacgggggcggtattgggggtggggacgggggcggtggagagggaaggttgggaggggttgcggtgtcggcgggggtaggagagcggttagggcgcgagtgggaatagtcgtagcggaggggtttcggcgcggagcggggtttacgtagtcgttagcgtttaggcgtttttcgtttttttttttaggtggcgtaaaattttgtgttttggattttggtaaattgttttttttatcgttatttttcgcggttttttaagggcgttagggtcgatttcgatttttttgtcgttgcggggtcgattttcgggttttgcgtttcgggttttcgggggagcgggggttcggcgggtattaagtcgttggtttattaagtgcgttttcgagatagtaggggattgtttaaagggggtgaaagggtgttttttttatttttttattaagattatttagtcgttttaggggatagttttgtaaggggagaggttcgggattgtggcgcgtattgcgcgttgcgttaggttttcgtattaagatttttttaatttaagattgtttttcgttttgtgtgtttcgttttagtagtttttcgcgacgatgttttttaacgttagttttattaataggaattatgatttcgattacgattcggtgtagtcgtatttttattgcgacgaggaggagaatttttattagtagtagtagtagagcgagttgtagttttcggcgtttagcgaggatatttggaagaaattcgagttgttgtttatttcgtttttgttttttagtcgtcgtttcgggttttgttcgtttttttacgttgcggttatattttttttttttcggggagataacgacggcggtggcgggagtttttttacggtcgattagttggagatggtgatcgagttgttgggaggagatatggtgaattagagttttatttgcgattcggacgacgagatttttattaaaaatattattatttaggattgtatgtggagcggtttttcggtcgtcgttaagttcgttttagagaagttggttttttattaggttgcgcgtaaagatagcggtagttcgaatttcgttcgcggttatagcgtttgttttatttttagtttgtatttgtaggatttgagcgtcgtcgttttagagtgtatcgatttttcggtggtttttttttatttttttaacgatagtagttcgtttaagttttgcgtttcgtaagattttagcgtttttttttcgttttcggattttttgtttttttcgacggagtttttttcgtagggtagtttcgagtttttggtgttttatgaggagatatcgtttattattagtagcgattttggtaagcgaagttcgtttaggtttgttaaaagtgggcggttggatatttttt

SEQ ID NO: 22 - DNA, 4501 bp, Artificial Sequence
  chemically treated genomic DNA (Homo sapiens)
gaaaggtatttagtcgtttatttttgataggtttgggcgggtttcgtttattagagtcgttgttggtggtgggcggtgtttttttatggagtattaggggttcggggttgttttgcggggaggatttcgtcgaggagagtagagaattcgaggacggagagaaggcgttggagttttgcgaggcgtaggatttgggcgagttgttgtcgttgagagggtaggggaagattatcgaggggtcgatgtattttgaggcggcggcgtttagattttgtaggtataagttggaggtggagtagacgttgtggtcgcgggcggggttcgggttgtcgttgtttttgcgcgtagtttggtaggaggttagtttttttgagacgagtttggcggcggtcgagaagtcgttttatatatagttttggatgatgatgtttttgatgaaggtttcgtcgttcgggtcgtagatgaaattttggtttattatgtttttttttagtagttcggttattatttttagttggtcggtcgtggagaagttttcgttatcgtcgtcgttgttttttcgaagggagaagggtgtgatcgtaacgtaggagggcgagtagagttcggagcggcggttaggggataggggcggggtgggtagtagttcgaattttttttagatattttcgttgggcgtcgggggttgtagttcgttttgttgttgttgttggtagaagttttttttttcgtcgtagtagaaatacggttgtatcgagtcgtagtcgaggttatagtttttgttggtgaagttaacgttgaggggtatcgtcgcgggaggttgttggagcggggtatataaagcgggaggtagttttgagttaaaggggttttggtgcggaaatttggcgtagcgcgtagtgcgcgttatagtttcgaatttttttttttgtagagttattttttaaagcggttgggtggttttggtgggggaataaagggagtatttttttattttttttggatagttttttgttatttcggagacgtatttagtgaattagcggtttggtgttcgtcgagttttcgttttttcgggagttcggagcgtaaagttcgggagtcggtttcgtagcggtagaggaatcgaaatcggttttggcgtttttaagaagtcgcgggaggtggcggtgaggaaaataatttgttaaaatttaaggtataaagttttgcgttatttgaaggagaaggcgagaggcgtttgggcgttagcggttgcgtgaatttcgtttcgcgtcggggttttttcgttgcggttgtttttattcgcgttttagtcgtttttttattttcgtcggtatcgtagttttttttaattttttttttttatcgttttcgtttttatttttagtatcgttttcgtttaatattttttttgttagttttttttttttttttcgtcggttggagtggcgagtttagtcgcgggttttaatatttttttataaatataaggggggtgttaaataataataggggtattttttttcgtatttaatacggagatgtaattgcgttagagatttcgttgcgatatttttttcggagttattttattaagggtagtagttgttttggaatcgtttagagtttcgtttttcgtagttttttcgtatttcgggcgcgaggatattcgagggcggtcgcggtaggggagttagggttgggtgcggagattcgttttggtttttttaagttaacgattttaggagaatcggatatattttcgtttttttttttttttgtttgcgtttatttaatattacgttttaatatttttagagatttaggttttaaattgtattattgttttttaaaaagttaaatgttaattttttaaaaggattagggcgggttggaatcgtcgcggggataggcgggcgggacgcgtcgtagtgttcgttttcggttgttagaaatgcggtgagtcgaaatttaaatgttttttcggagacggggataagttagcggttgcggagcgatttggtttatataggcgatatgcggtttttattttaaggagtttaggatgtaaggggttttttgtttatcgtaaagtaatttttagttttttaaaatttagagagtaattaatataataaagtaggaatgttcgatcggtcgggagttagcgtgaatatatttataaggtagaaatttcgaaagggtagttttaaaaattattttcgttttttttttgttttttttttttttattttgataagttattttatttcgatttagttttggattattttttattttagttttagttattataattattttgagaaaagtgttaatagcgtaggaatgggagaaaagatattttatttaggtattcgatttattttagtattaaagtgataaaaaaataaattaaaaggtaagtggatttcggtgtttatttggttttttattattcgaaaaaaatttagcgtttaagtagttgtaaggagagttttttagagaagcgggttttggtagcggcggggaagtgtttttaaatgggtagaatagttttttcgcgtcgggagagtcgcgtttttgttcgggtgttgtaagttttagtgtaaagtgttcgttcgttgttatgggtaaagtttcgtggatgcggtaagggttgcggatcgttggttgggggattagcgggagggttgggttagaggcgaagttttttattcgtttcggatttttttttttaggacgttcgtagcgtagttttgttcgttcggtttttttattttagtcggtcgttcgttcgttttttttgtttttcgttggaattattatagcgagttagataaagtttcgaaaatcggtttttatatttagcgcgattttttttttcgttttttttttcgttaagtttttgagaagttttgtttttttcgaggtaggaggggagttagggacggtcggggttcggcggtggcggtcgcgagtagtatagttcgggggtttttagtcgtttagattttcgtattataaagggtcggtgggcggagattagcgagagaggattttttttttttttttttacgttttttgttttgggaattcgggaggggcgtttatggggagggtggggagggtggggaaggtggggaggagatttagtcgggtagtcgagtattttagttttaggatgtaaatagagtaagagagtcgtatgaattaattacgcgcgtttattatttttttttgtttttttttaaattttttttttttttttgttgttttttcgtagtagtattgtttgataaatcgtatttttgttttgtgagtataaattatcgtaggcggaatagttgttttttatatagagaacgtattgcgcgtttatcgttacgttacgcgcgtattaggttgtagggcgtttcgttaaggttggggaaagggtcgcgttttgattaagagttttagggagagtggaggaaagaagggtattaatgggcgcgcgtttagagcgtgggatgttagtgtagatagggaggaatgatagaggtataaggaggaaaacgatgtttagaatgattaaaataatttagtaacgtattgttacgtatatttggagagcgcgttatgaataaatttttattgtatttgttggggggagttatgtattatgtattatgtatgtatagttatttggattggatattttttatttagattgagttttttaatttgttgttaaagtagtagatatcgttttttttgtttcgtttgtttaggttttcgtggggtttcgtgcgggaggcgtttgtttagttttgagatgtgtttgtttgttttagagttgggttagggcgagagggaggttgtttgttttttgttagtttgtattttatcgttttatttttacgttttttatacggagtttttaattttttagttaggttttagaagagataaattttttttgcgttttgtggcgtcggtttgtaatagtttcgggttgtcgggtttgggagaaattaaaggtgttagacgggagaatatgggaggggtagggggtattcgaatcgcgggatcggattttttaaaaggggtaagtggagagtttgtggatcgagtcgggggagttagtagagatttttgtgaaaaaaatcgttaattttttttttttcggataaatcggacgtttaatttttttttaggttttttttttttttttattattggaaatgcggttatgtataaaaaatgtatcgattttgattaaagaagaggagaggagtattattttcgtgtttttttttgggggggggggggagttttgagttaattaaaatttggttgttttttaggtattaattttttagtttattgatttataattttttttgaatattagtgaaagtgtattgtatgtaattcgtaaacgtgtatttatattttatttacgtttcgatttagttagttgtttagttttatatatgatttgtttgttttttga

SEQ ID NO: 23 - DNA, 1451 bp, Artificial Sequence
  chemically treated genomic DNA (Homo sapiens)
tagaaatagggttttattaggtttcgaatttttgggtttaagtaatttgtttgtttcggttttttaaagtgttgggattataggtgtgagttatagtgtttggttaaatattttattttttagattataagatgtttaattttatttttggtaaaaagttgatttagtaaattagggttttaagtgaagtcggttggggtttgaatttttgatatttgtttagggtggaagatatagtagttgtatttatgggttatttggggtgtagggtgattagttggaggttgtgagtttttttgttttttgaaatgtttgtacggggtatttaggaagggttggggattgggtgaggaggtgtggatagaatgttttttggaaattgttttaggggtagtttgagtggtttgagttgtgtttgttttattgaaggttggagttttagagaaaagtttttatggacggatttattttttagaattgttgtttttgcgggagaatatttttttttaggtgttgtttttagggtagtagggaagattgggaaaaattgaggggtaagagttgttggaggggggagttatatttattgagtgtttattatatgtcgggtgttgttgaaggtttgcgggttttataggatttttttttagatttttatatttttgtagattatacgtcgtttatagatgattttgaatttagaagggttgtttaggtttagggtttagttagtgagtggatgggtagaattagatttgttttggaagggtttgttttattttggcgtttaaaatgtgttttttattttttgttattaggataagtaaattcgagtattttttcgttaggggtttaagtttattatgggtttgatttttaaggttatattttcgtttttttatttgatagataggaaatttttgaaatgtttttcgtacgtgtaagacgttttcgcggtggcgggcgatagagggcgtatagtgggatcgtagtacgagttcggagtatttttagagtcggcgatttttgttttcgtttttgtcggtcggttttttcggggtttaggagggtagtatcgtcgggtttcgcgttatgatattagttttggagtggtgtagtgtgtaaagtttattggttggcgtggttcgggatacgttttcgcggagcggaataaaacggcgcgtaggtcgggcgtatttagtcgttattttcgagagcgtttgtcgtttttgcgtcgtcgagttagttgttaggtgagtgcgttttgagtcgcgcggttttgttcggcgcggaggggcgtttgggtacgtatttagcgtttttcggttttgttagtttcgtcgtagtttcggggttgtcgtaggcggggaattgtgagaagtgatcgtagttagttcgggtagtgttgtttttttttggaggtattaggttcgtttttatttcgggttttt

SEQ ID NO: 24 - DNA, 1451 bp, Artificial Sequence
  chemically treated genomic DNA (Homo sapiens)
gaaggttcgggatggggacggatttagtgtttttagaaaagagtagtattgttcgggttaattgcggttattttttatagtttttcgtttgcgatagtttcggggttgcggcggggttggtaagatcgggaggcgttgagtgcgtgtttaggcgttttttcgcgtcgggtagagtcgcgcgatttagggcgtatttatttggtagttggttcggcggcgtaggggcggtaggcgttttcggaagtggcggttgggtgcgttcggtttgcgcgtcgttttgtttcgtttcgcggaagcgtgtttcgggttacgttaattagtgggttttgtatattgtattattttagggttgatgttatggcgcgaagttcggcggtgttgtttttttaggtttcgggaaggtcggtcggtaggggcgggggtaggagtcgtcgattttgggggtgtttcgagttcgtgttgcggttttattgtgcgttttttgtcgttcgttatcgcgaaaacgttttgtacgtgcgaggggtattttaggagttttttgtttgttaggtgagaaggcggagatatgattttagaggttagatttatgataaatttgagtttttaacgaaagggtgttcgaatttatttgttttggtggtagagggtgagggatatattttgggcgttagggtaagatagatttttttagggtaggtttgattttgtttatttatttattagttgggttttgggtttagatagtttttttgggtttagggttatttgtgaacggcgtgtaatttatagggatgtgagggtttaaaaggagattttgtaggattcgtagatttttagtagtattcggtatgtaatagatatttaataaatgtaatttttttttttaatagtttttgttttttagttttttttagttttttttgttattttaaggataatatttggaaaaaggtgttttttcgtaaaagtagtagttttgaaaagtgggttcgtttatagaggtttttttttggggttttaatttttagtaggatagatatagtttaggttatttaagttgtttttggggtagtttttaggggatattttgtttatatttttttatttagtttttagttttttttgagtgtttcgtgtaggtattttagggagtagagaagtttatagtttttagttggttattttatattttaggtggtttatagatgtagttgttatgttttttattttgggtaggtgttaagggtttaggttttaatcggttttatttaaagttttggtttgttgaattaattttttgttaggaataaagttaagtattttatgatttagaaaatgaagtatttggttaggtattgtggtttatatttgtaattttaatattttgggaggtcgaggtaggtagattgtttaaatttaggagttcgagatttggtgaaattttgttttta

SEQ ID NO: 25 - DNA, 771 bp, Artificial Sequence
  chemically treated genomic DNA (Homo sapiens)
tgtcggtaaatttgttgatttaggttttacgagggagtaagtaatattggatttttttcggtatttcgagaatggggtgggggcgtttttaaaggatttttttttttttttagtgtttgtttttgttttcggttcgttttttgttaagatttggggatttttagggtttggagggaaagttttttgggacgattatagagcgttagtattgaattagtttggagagcgcggaaggaaagggtcggttcgtagagggcgcggggaaggtagggtggggacgcggtggagttcgcgttcgtttgttgaaggtttggaagtgtagcgtagaagatagagggtgattaggaagacgcgcgaacggggttggtcggtcggcgggtgggggaggggaggcgggggaaggcggttgagtgggtttttggagtgtgtgtgtttgtgttagtgtgtgtgtgtgtgtgtgtatgtgtgtgtttggcgtttggttagggtgattttttataaattatatgttttttagtttttttttaaaaggttgtgtcgagggttggttagtgaggttcggttcggggaaagtgaaagtttgtttgggttttttcggcgttagagtcgtttttcgtattttaggatagcggtgcggttttcggtcggggcgtttatttcgtagtagttagcgagcgagcgagcgagcgagggcggtcgacgcgttcggtcgggatttagttgttcgtatgatcgcgtcgggcgtcgtcgggcgttgtttttttacggtaa

SEQ ID NO: 26 - DNA, 771 bp, Artificial Sequence
  chemically treated genomic DNA (Homo sapiens)
ttatcgtgggagggtagcgttcggcggcgttcggcgcggttatacgggtagttgggtttcggtcgggcgcgtcggtcgttttcgttcgttcgttcgttcgttggttgttgcggagtgggcgtttcggtcgagggtcgtatcgttgttttgggatgcggagagcggttttggcgtcgagaggatttaggtaaatttttatttttttcgggtcgagttttattggttagttttcggtatagttttttaagagaggattggggggtatgtggtttatgggaaattattttggttaggcgttagatatatatatatatatatatatatatatattgatatagatatatatattttagaggtttatttagtcgttttttttcgtttttttttttttattcgtcggtcggttagtttcgttcgcgcgtttttttagttattttttgttttttgcgttgtatttttaagtttttagtaaacgagcgcgggttttatcgcgtttttattttgtttttttcgcgttttttgcggatcgatttttttttttcgcgttttttaggttgatttagtgttagcgttttatgatcgttttaagggattttttttttaggttttgaaaatttttaaattttagtagaaaacggatcgagagtagggataagtattgggaagggagggaaattttttgaagacgtttttattttattttcggagtgtcgaaaggagtttagtgttatttgttttttcgtggagtttgagttagtaggtttgtcggta

SEQ ID NO: 27 - DNA, 5942 bp, Artificial Sequence
  chemically treated genomic DNA (Homo sapiens)
taaggattaggattttaatataaatttagttttttattttttcgggttttttatgtttttttaaattcggtcgttttttatagttttttgtttttgggtttttttttatattttttattatttttttatttcgtatttaagattttatgaaaggtttttttagaaaagaaaaaatgaggagttttgcgatttgaatagtttttttttgttcgtttgtaaatttgaatttttggattttataatagtgagttttttttgtgtttattattcggtatgagtaagataagggggtgggtggtgggagagtggggaagtgtgggaaagaaaagtgtagataaatgggtggaataaagaagtttgatttaaagtttagatttgggggttagagttttggttttagtttaattaagtgtataagtttgataatcgtgggtttttttattatattggttttttttagtaaaattttatttatttttatttttagaggttttgattttttttattattttgtattataatatttgataatatgggtcgggagtggtggtttatgtttgtaattttagtattttgggaagtcgaggtcggcggattatttgaggtcgggagtttaagattagtttggttaatatggagaaatttcgtttttattaaaaatataaaattagttgggcgtggtggggtatgtttgtaattttagttattggggaggttgaggtaggagaattttttgaattcggggggtagaggttgtggtgagtcgagattatgttattgtattttagtttgggtaatgagagcgaaattgtattttaaaaaaaaaagaaaaaaattgataatatggtattttttttttttagttgtgaattttttgagggttgggaatgtttttatttgtatttttggtatatagtatatggatttatgtttgtgaaattagtgaattggttgtagttagggaattttttttgggggaagtgagatttgtacgaagttgggtaatttttggtttaggggggttgaaagaataggtgggggatttttaggagggtttgggatttgaaagtgaatttagattggtagggaggtgattttattatgttatttggagaggttgttttttttgatttaggtgggatttgtatgtggtttttaggtttttgtttggtttttttaaaatagtttttagaaaagtgaataaattataaatggttgatttatttttgatttttagttcgttttttacgaagatagagtttattgattaaaaattttaggatttgtatttgggtagattttaggaaggggaagttaaagggtttaggttagaggtttaagtttagattttagtagtagattagggttagattttattaaagttagaattcgaggtttatgtaagtttttagatttcgtttttaagttttgtttttttttttttttttttttttttttttttagtttagtgtggttattcgagggggttttttttttttagttatagttcgggtattttaagttgggaaatgtgttattcggggttggggtgttgatttgtagtttagttttttttggttttttttgaggatagtggggatgggattggtacggtttttatttcggggttttagttttatttttggtttttagtttttttttagtagtagtttgaagttcgggttggagatgggtattttaagtggaaggttgggaggttgaggattttgcgatagtgatagtaggtgagtagtggatgtgcggtggttggaattttggaagtgggtgttatagttttcgtagtattggagggagggagtaggagatttgtagagaaagaagaaaaagtattaagggtaggggaaggaaaaggggaagagttgaggttttagagggggttggtagggtagaataggatttttttagtttttttgttaaggaataaattgttagttaggtatagtggtttacgtttgtaattttaatattttgggaggtagaggcgggtagatggttttgagtttaggagtttgagattagtttgggtaaaatggtaacgtttgtttttttttttttttttttttgagatggagttttgttttgttgtttaggttggagtgtagtgttatgattttggtttattgtaatttttattttagcgatttttttgtattagttttttaagtagtcgggattataggtatatgttattatgtttcggtaaagtttgttttttataaaaaatatgtttgagtttaggaagcggaggttgtagtgagttgaaattatattattgtatattagtttgggcgatagagtgagatgagtgagattttgttttaaaaaaaaaaaaaaaaaaaaaaaaagggataaattgtttttttttttatttaatagtgagggatttaggttggtttaaaggtggtggtgagttatttgaattaattgtttatttagttatagattaaattttttattttatttttttttttttttttattattgtatttgatttgttttaaaaataaatttttttaaattattgtgggatttagagtagaatagttgaaagaaaaaaatggtaattagatttagtaaatttttgggtaaggggagggatattagttataatgattatagttaatatttatgtattgtatattatgcggtatgtattattttagtattttatatatattaatttattgaattttaataacgatttttattatttttatttttaagatgagaaaattggaatatgtagatattaggttgtttgtttaagtaagtggaattaggttttaaatttagggagtttatgtttataattatttgattatattattttgttaatttatatatgaggataaggaaagaattttttagtattgtgttggggcgtttggtgtggtgtggttgggagaggtagaatataatgagatatgggtttgagttaaagtttttttttatcggtttttcgggttttttgtttttttatggttttttttgattatgcgggttattttagggaagttagtttttttagcgagttgagtcgtatttttgttatttagtttatagatttttatttaggtagttttacggtttaggagatagtttatagttgttttttggttcgttcgagtagtatatattagtggggtttattagaaggtatttcgggcgttgatattttttttagttttttttgttttatgcggttttagtagttttttaagttttggtaggttttttttttgggttgtttttagtattcggtgagttattttatttttagttttaagggattttttttgtttatgtttttttgatgttttttttgttattgtttttgttgttggtgtttttattattttttttttttttttttttttttttttggtaggtttagtttgagatttttgggagttaggagcgttgtttttatttttaattagggttttatagaaagttcgggttgtagttttatttagggtggattttggtttttcgggttgtggttgttgttgtttatttttttagaggtcgttggggttagtggttggggtgaaggtgatgagtaagggtcgggatatggtttttgggagaattgagaaaatgatattaggtaagggaaggatgagataagtaagttaagttcgtggtgattttgtagtaattatagttttagagatttgttgggatgagaaaaagtagttaaaaatatttttttgttattaaagtaattttataatttaggattttgtagggtttaagggagagagattttgcgtaaaaatatggaattttataatatcgattttgttttttagtaaagattaataaaattttatgagattgttgtttagaggttttgcgttcggtttttatttttatttttattaataataaatattagtttttttttgaaattatttttttatttcgtaagatatattagtaggaaaaaaaaattagtttggttttttaagtttttcgcgattttatttcggagttttttttttttaaataaaaatagatgggttattttttagaagatttcggggagagttttttatacgtgttgttgtgtagttttcgtatcgtaaaatggcgttattttaattagaagagttgatataattaaatagttatacggtacgaagacgtatgcgtggcgataataataataaaaattataatttatattatttgagggttcgggcgtgcgtaaagtttcgggtttagtttttcgcgttggaatttttttaatagtaaacgagtaaagtttcgcgcgtttaggtggcgcgagtattaggatttgtcggttggggttttatttttatataacgtttttataatgtttttcgttttttttaacgtggttttcgttttaagtttattttttggagttaggaatttattttgtgggttaggaaaggtttttaggaggcggagggaaatttgtggaatgtcgagaagtcgtgtaatgaaataacgttacgtttgttttttattattattttgattagggttcgaaggttatatttagagtttaaggggaaatggagaagtgtaaagggacgagtagaatggttggtattattttaggttagcgtattgggacgttttagtttttatatcgtttattttattttatttaagtttttacgtacggagttaagtcgtatttttttttttatgaggtaggagttcggaggaaatagtatgttcgttaagggtttttggcgggattgattcgtattaggggtttaataggtaataaggatttagcggattggtcgaggataggttagttttttgggtagtagcgtcgcgtcgggattagaggggaacgtgaggagagttgcggaaagagatttagtttggttttttttttttttcgttttaagttagtttttttatttagtgagtataaaattgtattgtttagattttcgggtttcgaacgttatatttggttttcgttttcggtggtttttcgttgtgtttcgttcgtaagcgttttttttcgggttttcgtgatagttaggtcgtgcgcgggttattttgggattggtagttcgtttttttttatttagttagtttttttttttatcggggatttcgtgtttcggtatttatcgcggtatttgatttttggcgtttgcgtgttgtttttttttttattttttttaatttttattttttttattttatttcgtttgtcgcggtcgggttcgcggtttgcgttgtagcggtcgtcgtcgttttttggaagtagtaatttttttattttattttagttttggttttcgtttagtcggtgagtttgaagtcgtcgttgtttcgagttttttgtcgttgggagcggtatatggggttttcggattttgatgtgggggcgggggaggaagcgattaggttcggtacgaaggagggagaggtggtttgaggagcggaggggggatgtgtggatttcggtgaaagggatttgataatcgtttttaattcgtgagaaaaggaggagttcggtttttgtttgagaatgataaatttggaaatttttgggaaaggcgtgggggttatgtagagatttgtattggtagggagtttgagtcgaggtttttgtcggagttgatatagaggagagagggttttggttttcgggagttttagggatgtgggtcgggttggtgggttaaagtatttgttggttttttttaagtggtgggattttaaagaatgtttaattttaaagaaaaggggttgagatgtaaattagaggagttggagaggagtgttttagagtttgggttgttttaagaaagggtggtttcgaattttttcgtggttggagggtcgaatgtgggaggagggaggatattagaggtagggaaggagaatttgagttttattgatattgttttttttttagt

SEQ ID NO: 28 - DNA, 5942 bp, Artificial Sequence
  chemically treated genomic DNA (Homo sapiens)
gttagaaaaagaatagtgttagtaaagtttaagttttttttttttgtttttggtattttttttttttttatattcggttttttaattacgggagaattcggaattatttttttttaaagtaatttaaattttgaagtatttttttttagtttttttaatttatattttagttttttttttttgaagttaaatattttttggggttttattatttgaaagaagttaatagatattttgatttattagttcgatttatatttttggagttttcgaaggttagggtttttttttttttgtgttaatttcggtagggatttcgatttaggttttttattaatataagtttttgtatgatttttacgttttttttaagggtttttaagtttattatttttaagtaagaatcgggttttttttttttttacgggttgggggcgattgttaggttttttttatcggaatttatatatttttttttcgttttttaggttatttttttttttttcgtgtcggatttggtcgttttttttttcgtttttatattaaagttcggagattttatgtgtcgtttttagcgataagggattcggagtagcgacgattttagatttatcggttggacggggattaggattggggtggggtagggaagttgttatttttagggaacggcggcgatcgttatagcgtaggtcgcggattcgatcgcggtaggcgaagtggggtggggggagtggaaattagggagggtggggaagagggtaatacgtaagcgttaagggttaggtgtcgcggtggatgtcgggatacggagttttcggtagagaaagaaattggttaaatgagagaaagcgaattattaattttaggatgattcgcgtacgatttggttgttacgaaggttcggaggagggcgtttgcgggcggggtataacgagaagttatcggaagcggaagttaggtatggcgttcggggttcgggagtttgggtaatatagttttgtgtttattgggtgaagaggttgatttagggcggggaaaggaggaagttaggttggattttttttcgtagttttttttacgtttttttttagtttcggcgcggcgttgttgtttaggggattggtttattttcggttaattcgttgggtttttattgtttgttgggtttttagtgcgaattagtttcgttagagatttttgacgggtatattgtttttttcgggtttttgttttatgaggggagaggtgcggtttggtttcgtgcgtagggatttgggtggggtggggtgggcggtgtgagaattggaacgttttagtgcgttaatttgaggtggtgttagttattttgttcgtttttttgtatttttttatttttttttaggttttaagtgtgattttcgaattttggttagagtaatggtgaggggtaggcgtgacgttattttattatacggtttttcggtattttataggttttttttcgttttttgagggttttttttaatttatagagtggatttttggttttagaaaatgggtttggagcgggggttacgttgaggaaggcgaagggtattgtgggggcgttatgtaaaagtaggattttaatcgatagattttagtgttcgcgttatttgggcgcgcggagttttgttcgtttattattgaaaaagttttagcgcgggaaattgaattcggagttttgcgtacgttcgagtttttaagtaatgtgggttgtggtttttgttgttgttgtcgttacgtatgcgttttcgtgtcgtgtggttatttgattgtgttaatttttttgattagaatggcgttattttgcggtacggaagttatatagtaatacgtataggagatttttttcgagattttttagggagtgatttatttatttttgtttgggaagaggaaatttcgaaatgggatcgcggaagatttaaagggttaggttgattttttttttttattggtatgttttacggggtgggaaagtggttttagaaagaggttggtgtttattgttggtgaggatgggggtgggggtcggacgtaggatttttggataatagttttatggagttttattaatttttattaaggagtaaagtcggtattgtagggttttatgtttttacgtaaagttttttttttttaggttttgtagagttttaagttgtggggttattttagtggtaggaaagtgtttttgattatttttttttattttagtaggtttttgaggttgtggttgttatagggttattacgagtttggtttatttgttttattttttttttgtttggtattatttttttagtttttttaaaagttatgtttcggtttttgtttattatttttattttagttattgattttagcgatttttggaaggatgggtagtagtagttatagttcgagaagttagagtttattttggatggggttgtagttcgagttttttatgaggttttgattggggatgagagtagcgtttttgatttttagagattttagattgaatttgttagagaaagaaagagaaagaaaagaagaataatgaaggtattagtagtagaagtagtggtagaaggagtattaggaagatatggataagggagattttttgaggttgaggataagatgatttatcggatattgagggtagtttaggagggggatttgttagaatttaggagattgttggaatcgtatgaggtaggaggagttggggggaatattaacgttcgggatgttttttggtggattttattgatgtgtgttgttcgagcgggttagggggtagttgtgagttattttttgggtcgtggggttgtttgggtgggggtttgtgagttgagtggtagggatgcggtttagttcgttgaagaagttggtttttttgaggtagttcgtatggttagggagagttatggagagataaggagttcggaaaatcggtaaggggaaattttagtttagatttatgttttattgtgttttgttttttttagttatattatattagacgttttagtatagtgttgaagagttttttttttatttttatgtgtaggttgatagggtagtatagttaagtggttataaatatgagttttttggatttaaagtttgattttatttatttgggtaaataatttaatgtttatatgttttagtttttttattttagaaatgggggtagtaagaatcgttgttaggatttaatgggttaatatatgtaaaatgttagaatagtgtatgtcgtatagtatgtaatatatgaatgttagttatagttattatgattaatgtttttttttttgtttaagagtttgttaggtttggttattattttttttttttaattattttgttttggattttataatggtttaaagaaatttgtttttaagataagttaagtgtagtagtgagaaggaggggaaaagtggagtaaggagtttgatttgtaattgagtgaataattaatttagataatttattattatttttggattagtttggattttttattgttaagtaggaaggaaggtaatttgtttttttttttttttttttttttttttttgagataaagttttatttattttattttgtcgtttaggttggtgtgtaatggtgtgattttagtttattgtaattttcgttttttgggtttaagtatattttttgtagaaagtaggttttgtcgggatatggtggtatgtgtttgtaatttcggttatttgggaggttgatgtaggagaatcgttaaggtggaagttgtagtgagttaggattatggtattgtattttaatttgggtagtagagtaagattttattttaaaaaaaaaaaaaaaaaaaagtaggcgttgttattttgtttaggttggttttaaatttttgagtttaaagttatttgttcgtttttgttttttaaagtgttgggattataggcgtgagttattatgtttagttggtaatttgttttttagtagaaaagttgaaaagattttattttattttgttagttttttttgaggttttaattttttttttttttttttttttgtttttaatgtttttttttttttttttgtaggttttttattttttttttttagtattgcgagaattgtgatatttatttttaagattttaattatcgtatatttattgtttatttgttgttattgtcgtagggtttttagttttttaattttttatttggggtgtttatttttagttcgggttttaaattgttgttgagggggggttgggagttaggaatggggttgggatttcggggtgagggtcgtgttaattttatttttattgtttttaagagagattaggaaggattaggttatagattagtattttagtttcgagtgatatattttttagtttgggatattcgagttgtggttgggagggagagattttttcgggtggttatattgagttggagggaggagagaaggagggaggagaaagatagggtttgggagcgggatttaaggatttatatgaatttcgagttttgattttggtaaagtttgattttagtttgttgttgaagtttgaatttgggtttttgatttgggttttttgattttttttttttgggatttgtttagatgtagattttgaagtttttggttaataggttttgttttcgtgagagacgggttgagagttagaaataaattaattatttgtggtttatttatttttttggaagttattttgaggaagttaaatagaagtttgggagttatatgtaagttttatttgagttagaaggggtagtttttttaggtggtatgataaggttatttttttgttaatttgggtttatttttaggttttagatttttttgggagttttttatttatttttttaatttttttggattaagaattgtttagtttcgtgtaagttttattttttttaggaggagttttttgattatagttaatttattgattttataaatataagtttatatattatgtgttaagaatataggtaaagatatttttaatttttaaagagtttatagttggagagggaaagtgttatgttattaattttttttttttttttttgagatgtagtttcgtttttattgtttaggttggagtgtaatggtatgatttcggtttattataatttttgtttttcgagtttaagggatttttttgttttagtttttttagtagttgggattataggtatgttttattacgtttagttaattttgtatttttagtagagacggggtttttttatgttggttaagttggttttgaattttcgattttaggtgattcgtcggtttcggttttttaaagtgttggggttgtaggtatgaattattattttcggtttatgttattaaatattataatgtagggtgataagggaagttaaggtttttagagatgagaatgggtagggttttgttggaagaggttagtgtgataggagggtttacgattattaagtttgtatatttagttgaattgggattagaattttagtttttaaatttaaattttaagttaaatttttttgttttatttatttgtttatattttttttttttatatttttttatttttttattatttatttttttgttttgtttatgtcgggtggtaggtataagaagagtttattgttgtgaaatttaggaatttaaatttgtagacgggtaggggagggttgtttaagtcgtaagattttttatttttttttttttgggaaagttttttatgaagttttggatgcgaaatggaggagtggtgggggatgtggaaaagaatttaggggtagggggttgtagggggcgatcgagtttagggaagtatgagaaattcgggaaaatggggagttgggtttatattaaggttttggtttttg

SEQ ID NO: 29 - DNA, 2580 bp, Artificial Sequence
  chemically treated genomic DNA (Homo sapiens)
gaattcgagtttataagtttttttaaaaaaaattgatttaagtaaattttgggaagagtttttttgttatataatttaaggttttaaggttttcggatttatatattttataaatgaattagttagtttgtttaaatgtagggaaattgtgggaagaatgttttttttatttaatttaaggttttaaggtttttttaattaattttattagttaattagttaattatttaaaaataaaagtttgaaattgttaaaaaaaaaagataaggaaaaggaaagaaagaaagttattagtttgtttggtatataatatttaattgttgtttgatttacgtgtgggttttagatgtagatttttagtttttagttttttagagattgatattaggtttgttatacggtttaaaatgatgagtatatttatgaattttaattttatttttttttagatttttttggttaagaaattatgtagtttgtatgaagtaggtatttaaaatatatttgatgatttaatttttattggagaagaaatatttatatatgtttttttatttttatatgttttaaatatgtaaagattaaataaatatttttagaagtatttaaattttttaaagtaaatttattttaattagtaataggatttttttaatattggaaagttgagtgtgatcgtatttagtggtgataagtgtgagtttgtttggggagagggtaggatatttaggattttttaagtttagagttaatataataaagattattgagtgtttatttgggtgggttataattattgtttataggagtttatgaattataagtaaaagagtgaggagatatgattagtttataaataatttttaatatagagtagaaagtaatgaattattgtaatggagttattatagtgttaaggatgtttagagggtatttttgataggtagaggtgagggttagggaaggaagttgtagtttagttagttagagttgttggaatagatatgataatgttgttgttaaattgtttttttttttgaggatagaatgtttcgtgtaagtggtttggtggaagggattagtgttttaatatagggtgatttataagtaggaaagtgtgttttagaaatttagattagagtgatagattgaattggattatgggggatttatttgaatgttatttattgtattgtttttgcgattagtgttagtaaagtgttaaagggattgagtagatgagtgatattatgtaatataagttttgagttttatttgttagattgattggagaggggtttggttagttataggaaggtaatttggtatgtagttattatttttgagttgatgtaagtttttttgtatggagagttggttttttttattttgtgggaaaagagaataaaggagtatgggagtgtttaagggaaggagaaataaagggtagagaggtagcggtggtgttagggaagtttataggagttaatagtagggttgttttaatttagagaggaagcgatttggtgttttcggttttgtggttttttttatttaataatattttttattttataataatgttagggaaggcggaggttggtatagtgtattaagatatagttatttttgggtgatagaggtttagggtagtttattaagtaggtagaagtttttgatatatattttgagagataaagtaagattttgtattttaatttttagaattttttttattatttattatagtttcggagttatatagtttttattattttattataattttagaatattagagaatatattattttatttaattattttttattatatgtgaaaaaaatgaaggatatgggggaagtgtgatttgttttaaattatatattttatggtagagttaggttttttgtttgttatattagtgttttttttgttataattattttgaagaatttattttttagtaagaaaatatttttatggagagtagttggaaaatagttgagagatggaggggaggttgggggtgtggagaggggaaggggtaagtgtatagattcgttgaaggggggagaaaaggtcgtggggatgaagttagaaggtagaagggtttgttgggtttggtatgaaggagtatgagtttattgagttttttttggtttttttatgttagtaatgtacgtggtttagtttgttgtggtattggttagtagtcgaggtatcgttagttttgtgtgtgagtatgtatttttaggtaaagttattgaggttcgggtgatagtgtttcggtaggttgatagttaggtgattgaagtttgtgcggtaatttatatgatggggaatgagttgatttttttagatgattttatttgtacgggtatttttagtggaaattaagtgaattttattatttaaggattgagggttatggatacgggattttatatttgtaaggtggagtttatgtatttatcgttatattatttgggtataggtaacggagtttagatttatgtaattggtgagtaaagttattttattgagttgatatttgttgtattgtagttttttatgtat

SEQ ID NO: 30 - DNA, 2580 bp, Artificial Sequence
  chemically treated genomic DNA (Homo sapiens)
gtgtatagaagattgtaatgtaataggtgttaatttagtgaaatggttttgtttattaattatataaatttgggtttcgttgtttatgtttaggtagtatggcggtgggtatatgagttttattttgtagatgtagagtttcgtgtttatggtttttagtttttggatagtgaggtttatttgatttttattggaggtgttcgtgtagatggaattatttaggaaggttaatttattttttattatgtaggttgtcgtatagattttagttatttggttgttagtttgtcgaagtattgttattcggattttagtggttttgtttggagatgtatatttatatataaagttggcgatgtttcggttgttggttagtattatagtaggttgggttacgtgtattgttagtatggaaaagttaaagggaatttagtgaatttatgtttttttatgttaagtttagtaagtttttttgttttttagttttatttttacggtttttttttttttttttaacgaatttatatatttatttttttttttttttatatttttagttttttttttattttttaattgttttttagttattttttataaagatatttttttattgagaaatagattttttaagatggttgtggtaggaagaatattgatatgataaatagaagatttggttttattatgaaatatgtgatttggggtaagttatattttttttatgttttttattttttttatatatagtaagagataattagatgagatgatatgttttttggtattttaaggttatgatagaatgataggagttatatagtttcggaattataatgagtggtaggggaaattttgaaggttgaggtatagaattttgttttattttttaaagtatatgttaaaaatttttgtttatttagtgagttgttttgaatttttgttatttaggagtagttgtgttttgatgtattgtattagttttcgttttttttggtattgttgtagagtggaagatgttgttagatgaaggaagttatagagtcgagggtattaggtcgttttttttttaggttgaggtaattttgttgttaatttttgtgggtttttttgatattatcgttgtttttttgttttttattttttttttttttgaatatttttatgtttttttgttttttttttttataggataaaggagattagttttttatatagagaggtttgtattaatttaaaaatagtggttgtatgttaaattatttttttgtaattaattaggtttttttttagttagtttgataagtgaaatttaaaatttgtgttgtatgatgttatttatttgtttaatttttttgatattttattaatattgatcgtaaaaataatataataaataatatttaaatgagttttttatgatttaatttaatttattattttggtttgaatttttaggatatatttttttgtttataaattattttatattagagtattagttttttttattaagttatttgtacgggatattttgtttttagaagagaaaatagtttggtagtagtattgttatgtttattttagtagttttagttagttagattatagtttttttttttaatttttatttttgtttattagagatgttttttgagtatttttagtattgtgataattttattgtagtagtttattattttttgttttgtattaaagattatttgtgagttaattatatttttttatttttttatttgtggtttatgaatttttgtgagtagtgattatagtttatttaagtgagtatttaataatttttattgtattgattttaagtttaagaaattttaaatgttttgttttttttttaagtaagtttatatttattattattaaatgcggttatatttaattttttagtattgggagggttttgttattggttgagataaatttattttaggaaatttaaatatttttaagagtgtttatttaatttttatatatttaaaatatgtaaaaataagaaaatatatatgaatattttttttttagtaaaaattaaattattaaatatgttttgagtatttattttatataaattatatggttttttagttaagaaggtttagagagagataaggttgagatttatggatatatttattattttaagtcgtgtaataaatttggtgttagtttttgaagagttgaaaattgaggatttgtatttgaaatttatacgtaggttaggtaataattaagtattgtatgttaaatagattggtggttttttttttttttttttttttgttttttttttttggtaattttaaatttttatttttaaataattggttaattagttagtagaattgattaagagaattttaaaattttgaattaagtaaagaaggtattttttttataatttttttatatttaaataagttggttaatttatttataaagtatatgaattcgaggattttaaaattttgaattgtatagtaaaaaaattttttttaggatttgtttaagttaattttttttaaaggaatttgtgagttcgaattt

SEQ ID NO: 31 - DNA, 18997 bp, Artificial Sequence
  chemically treated genomic DNA (Homo sapiens)
atatttggtgatttttgtatttgatggattagttggtattatttagattgatgaattggtttatttgattttgtagcgttttttatttaggaatttagggtaagaagatagttttgattttttatgattttattttcgattattaggattcgtggtttattggtttttttaattaagttgtttttaaaaattttgattttcgaatgtttggggagattgatttgagtaataataaaatttcgtttttttgtatagttggttgtgtatgaattattttttttttattttaattgtttagttttgatgaattagttttgtttaggtagcgggtaaggtgaattttttgggaggttataaattttttttttatgattgtaagttattattgagtattttaaaagtaggtggagttgataaattgatagtttaggtttggtagttatagattatttttgttttaaatgggtattattgttatttgaataaattgtgaataaggtatatttttttgattgaatatagaaatgagtggaatagtttataagttgttttgtttaatgatagttattagttataagtggttatttagatttaaataaaagttaaataaaatttttttagttatattgtaattaagtatttttatttttttaagagatagtttaatgatttttaaaaaattttttttttttttttttttttttttattttttttttagttttttagaaatgtaattgtagttttttattttttttttattagatattttttatggggtaggtttatttaattatgtgtttagaagttttagagaggaatttttatttatcgggaggttgttttgagagataatagtttatttataatttaaagtatgtttgttataaagtttttttttatttggagagttttggttatttttataatttagttttgtttataaaaggtattagtagttattgtttagtagataaggtattgaaggtagtatgtagattttttaattattcgtttttttttttcgtgttatttatgttagtattttatgttttattttaaaagtattttttttttgttttaaaagtgaaatggtatttttaaggtagaaaattagtatttttttttttaaggtagttttggaataaaatattattttttttatattagattttatttttgttaagtggattttgtaagtagcgagagagtgaatttgtatttgggttataatattaattagtttaagtgtttaatagttatatatgtttagtagttattatattgggtagtgtagagatattgttatagaaaattttattgtatattgttgtttaggtattgatgattttagttttatgttgtggtgagtgatttgtttttggaaaggataatatagtggatttattttcgggtgttagtaagggggtaaaattgaggtttttttgagatttttaaatagttaggagggagggaaattagataaaggagttgaaaagttgttttattttattagaaattgaaaggatgaagggatatgggtttattgaagatatttattgttttattaggatttgattagaaatttgatattttaaaaatttgattttgtgttgtttgtaatttgattttttttaaatttttatttttgaaaataataatttattttatttgttttattaggaaataaggagagggggttttggttatattggggttaaagtttagaaggtagagattatatatgtaatagtagttaatagaagtaaagaggggaattttaaggtaaacgtgataatgtaagggaaaggaaatggaaaagatatttttttttatgcggagattttttttagaagagttattgtttatttaaattttggaggatttgtgttttttttggtaaataatgtgatttttttttgtagaggatgtatgatgtaaaattatggattttgtttttaagggaatttttttgtttttttatttttttattgttttatgtaatgaaatttttaaagtatattttgattttagttttagtttataaattagatttgttttttaagagttatttgagttgtagtttttttagtgttattttttgtatatttaaattattgggggcgttgtagtttggttaatttttaattatttagagaattaggagaagtagatatggttaattattaggattaatgatagttaataagagtaaatatttattgaatatttattgtttgttaaatattatgttaatagtttaatgtttaatattattttatttaatttttatataattttaatgagttaggtattgttatttttgttttatagaaaaggaaaatgagattgttagattgagtaatttgttttagattagataattagtaaatagtagaattaaggtttaaatttaggattgtttgattttagagtttgtatttttatttattattttggataagaattttaaattatattaatattttgatttaaattaattgaaattaatattagtgttagtaattttttattgatagattagttaaaaatgttttaatgattatagaattataaattgaatagagaagtaggtttttttttgttgttttaagtagtttagaaaagttttagtgtagtatattggtgtgattagtaggttttagaaataaatgtatttaataagtttatttggtgttttttattttttttttttttttgtgagagtttttggggagattttaatgatgatagttgatatggattaaaggtagataaaatataagggagaaaatattggaaggagtttggttgatggaatagaaattttttgaagaatttatatttgaatgattaaaaagtattagtttagtttgtaaagtttgaagttgaatattcgtgaggaagttatttttttatttgttgatgaggtagagagaaaggtttaatttgttagagaaattgatgttttttgttatattatattgaaataagaattagtttgttatttatttttttttttttttttttagtaatataggtttaggttgaatttatgtttatatagttgtataaatttttacgggtatgaatataaatttatttatttaaatagattttaaaggttttttaggttattttttttttttttagaatttaagtaaggttttgattattattgataatatattcgttagttaatgcgtgtagagtttttagtttaaaggtaaataaaaagtgaaaaggggtcggcgtagtggtttatttttataattttagtattttgggaggttgaagtaggtagattatttgaggttaggagtttaagattagtttggttaatatggcgaaatttcgtttttattaaaaatataaaaattagtcgggcgtggtggtaggtgtttttaattttagttattcgggaggttgaggtaggagaatggtttgaatttaggaggtggaggttgtagtgagtcgagatcgtattatttattgtattttagtttgggtgataagagtaaaattttattttaaaaaaaaaaaaaaaaaaagtgaaaaggtaggaacgttgttgtttatttgttgttttaggaattttgtttacgtatagtttaaaatattaagaagttgaaaataaagtatttggttatgtgtggaaaaatttatagttaaaaggtgagatgaattgggtttagaaggtcggatttacgtgaaattaaaagggtaacgaaagttagaatttaattttttaaaaaaagttaaaataggtcgggtgtagtggtttatgtttgtaattttagtattttgggaggtcgaggttggcggattataaggttaggagttcgggattagtttggttaataatggtgaaatttcgtttttattgaaaatataaaaattagtcgggcgtggtggcgcgtgtttgtagttttagttattagggaggcggaggttgtagtgggtcgagatcgcgatattgtattttagtttggtcgatagagtaaggtttcgttttaaaaaaaaaaaaaaaaaaatagttaaaatttttaaaataattttatttgttaaaatataaaatttgaaattattttagttttttttgtaaaatgagttggagagagtagggttgaattaggtatgttttttcgggtttttcgacgttgatatttcgggatattatattaggtttaagatattagtttgcggaaagagagttgttaaatttgattatatgttttttgtacgatattcgatagttgtttttttttttattagtttttttaaggttgtaaatatatttgatttacgtgagagtttttataagttagtataacgttaggttttaaggaggcgtttaataaatgttggtattgtagggttagatttcgagttttagtttagaattttgttgaggttaggttttttttttgtttttcgttttttattatatttatttatttttttaagtaattaagtttaaattggggtttgtgtagtgattggtcgcgtcgggttttattgcggatgaatttgatttgttttaatgatttgtgatagatatttgtagatagcgtttttaatagaattagggttaggttggtattaaattttaggaacgttaggtattgttttaaagtagatgtaaatcgttaaattttttaggatttagaaggattagagagagtcggatatttttggttagttacgcggtttttagtaaagtttattttttttttttttttagtgtgttttgttgttagagtaattgtgggcgttatcgagttgacgggcggaaatagaatagaaagagtatacgtttttagtttattgatagggttattgcgtagacgtattaatttttttgagttgtagttgagtttgttgatgtagttcgcgtttgcgtattagttgttacgcgttttggtcggttttagcgtttgcgtaaattggtatatcggggagggcggagttaggttacgagggtgcgtatgcgtaaatagtatattcggtgtggtcgacgggttttttaagagtttggggcgcggattggagtattttgcgtgtagttatgtcggcgtcggtagtgtttgttatttcgcggtttttagaagagtatttgagttttatttcgtagcgtttgaagttgttggacgcgtatttgttgtatatattgttgatcggggcgttgtagttcggttattgttttttcgtggggatttttttttttaatttttttttttcgggttttattttttgtgtggggagttttattttagcgggtaatggttttataagtgattataataataatgtgttattttggtgtgttgtttttgtttttatagtattttatattagattatcgttttttgaagttatgagaagagtttgtattgtttttttgttgtgaatggggaaattgaggtttagaaagtttagattatatgtttaatattaaacggtttcgtaggagttggatttaaaagtttaaagaaattattttcgtgtcgttattttatttggtgatttattttatttaatattggttcggggaaaattttattttaattttaatttaggtttaatataattttaaaattagtagattttttaaatgaaaaatttaattttgaattatttttgttattttggtttaattattattaattttcggtgaaacgttttaatgaaagtgtaaagaatataaatattggtgttttttttgttgaattattttttatttgattttgttttttagttgttattatttttttttttgttgaggaagttgttattttattgttttgaatttaatttttgtttatataattttattttagttttatttttttttttgattttaggatttggtaattttgtagattgttatatttagcgagaatagtttttattaatttttgttaaaatttgattttttttgtttaacggggatttagtgaatattgaaaataggcgtggtttttattattggtattatttgttattttgattttgaaaatatgttagtatttatggtttttttttagtgtgattattagttaggttattagttgtatttttagtttaatatgaggtattatggtaaaagttttggtatatgttttttattcgtaaagagtttatggtttagttggggtatagataaaatatagtattggaattgtttggaggtttggtatagtggtttatgtttgtaattttagtattttgggaggtcgaggtaggtagattatttgaggttaggagtttaagattagtttggttaatatggtgaaattttatttttattgaaaatatataaattagttaggtatggtggtatatatttgtaattttagttattcgggaggttgaggtagaatcgtttgaattcgggaggtggaggttgtagtgagtcgagatcgtgttattgtattttagtttgggtgagagtgaggtttagttttaaaaaaaaaaaaaaaaagtttggtgatagtggtgttgtgtttaaagttatagatttatagaatgtttattgtatatttatattgttttgatatattagagatattttttagaatttaaaataggtttgaggatttaatgatttgtgtattgaagttgtagattagttttttgattggatatttagttattatttttgatttttgttttagatgattaagatttagttgtttgtggtggcgtttttgtttttaggatgtgttaattattattcgattagatatattatttttttgttttaagtattttttattatttatttatcgttttttgttacggtattatatgtttttattagttagttcggagaaggaattttgatgagaatttttgatttaattttgtttgatgtttttgtttttaggtttggaagagtaggagtaaggtagggtttgaaagttgattttaaaaaagatgttttttttatgtagaagttattttgtttttataagtttttagggtttagaatgattttttatggatgttttgaagaatgtggtttgttgaagagtgggtatggattagagttatagattattagtgtaataaagttagaaggtttttttgagtaaatgatttttatttatgttaagatttgtttttgagttcgttgtggttgaaattgaattggtagattggattgttttttttttttttagtgggaattaggtggtttgttattgaagaaaaatttagtaaaagggtatattagtaatggggttaataagggggattaggatttttagatttgttagataatagataatagagttatagaaatgaaagtaattttaagaaaagaagggatttatgataatttttagttgttatagaagggtatgatttattttttttttgatagtattgatttttttaaattttgttttttttgttatttgttagtttagattattaattggagattggttttaatgggaaatttggacgtttattttttgttttgattgttggtaaaggtagttttgtttttttttatggtgttggggtttttaatttttttgtggaattttttgttgtaagagaatggaggagtttagtgagttgggagagggaaatgtaggcgatattgttgaaggattaggtagtgttgggtgttagatgtttgaatgttaggttaaggaatttggattttttttgagatggagttttgttttttttttttaggttggagtgtaatggcgatttcggtttattgtaatttttgttttttaggtttaagtaatttttttgttttagttttcgaagtagttgggattataggtatgtgttattacgttcggcgaattttgtatttttagtggagacggagtttttttatgttggttaggttggttttaaatttttgattttaggtgattcgtttgtttttgttttttaaagtgttgggattataggtgtgagttattgtgttcggttaggaatttggattttattttgtaggtaatagtaaagtttttgaagatgtttttttttttttttttgagacggagtttcgttttgttttttaggttggagtgcgttatttcggtttattgtaagtttcgttttttgcgtttacgttatttttttgttttagttttttgagtagttgggattgtaggcgtttgttattacgtttagttaagtttttgtatttttagtggagatagggttttatcgtgttagttaggatggttttgattttttgatttcgtgattcgttcgtttcggttttttaaagtgttgggattataggcgtgagttattatattcggtattgagggtgtttttttaaagaaaggaaaagatttaaaattggtgttagtatgtaggatgaattggagggaaatgttttttaattttttttatttttttttggtagtttatttttttttattttttttgtatgtgttagtttagtatatgttttttggaaattgattagtatattttaaattaatttagaacgttattaaatttttaaaaaatttgttgttattgggtttgatggtatgaaaatagtttgtttttttttatttttttatagttgagagatttaattatggttttaagaaggaattagaggtagaaagttgttattgagagatttttttttgtgtgtgttttggattattagagtataatatattggttttaaaaggattttagaggtagaatatttttttatttgagatagattttaaatatttagtagttgattgtttattttgtagttagatatttttagaagaggatatttgttttttttttagagttatattttagtgttggtaattttttagtttttttttttgtttaattgaaagttgtgtttatttaaagtgttatttaggagggataagtagaaaatattaagattgtttttaaaataagtttttggttttgaaataagttttaatttattttttaatttttatttgttttgttttttaatttatatgaggtaattttgttttaaaaaatagttttgttttttttagtttataaatttaaaattagtttgaatttgtaaggtaaggaggtttagtttagagttttttgttttacgggagttattaggttgttgtggattggggtttagtattttttttggaattatttattagatttgtggattttaatattattttttataattgttattcgagagattagaagtttgttatttatgtgtttgatagttttgtttttaaatattttttatattattgttatttttttattttttgttttagttttttaatattttttatgaagattattgtaattttttttattggtttttcggtttttggtttttagtttattttttattgtgtttgtaggtttgatttgatttgtaaatttgattgtgttatttttatgtataatttgtgttttttaaagtaaaattaaaattttttttttgatatataggtttttttatgatttggttttttcgttgtttgtagttttattttttgtttttgttttttttatattttgttttaatagtattgagttatttgttattttttgaatatttttatgtgttaaattatttgtttttgtttgattgtttttaaaatttttttattttttagattttttagtttaagtgtaatttttttttttttttgttattgtttttaaagagaataaggttttgttatgttgtttaggttggttttaaattttttggtttaagtagttttgttttagttttttgagtagttaggattataggtatatagtattatgtttggtttattgttttttggaatttttttttgattttttagtagattgaggttttttttttgtattttttttttattttgtatgtgtgtgtgtgagagagatatggtattgtgttgtatttgggtgtttgttttttttttggaaggtgagtttttgagggtaggggttgtttttttatttttttatttttagtgttgaatattgtatatgttaaatggtgagtaggtttatagttatgttaggaatagtgagtaatgatgtgttaggttttttgttaaggtgttgggaatttaattgtgaagtatatagacgtggtttttatttttatagagtttgtaattagtgggaaatatagataagtaaatatggatatggtgttgatggagaattattggtgagaatgggaatataatgtgtatttaattttgtttagtggttttgtaataatattttttttatatattcgtttttttaaagtaggttttataaattattttattttttttttttttttttatttttagttggtgattttgtttttatttttttattaaaaaaaagaagtagataagaatttttttatttttttattattgaattataatagattatttatttttatatttatattttttgattttttatggtggatgatgtgttttttttttgtgaaagttttgtttgtgtagaggatttagtttttttttgtttatttagggatttcgtttttgtaattatttttttgtttcgtgttattaatttttgttttttttttggattatttttattatataaatatgttttaatattgtttatttaaaaaaaattcgtttgattatagataattttttagttattattttattttttttttattattatagaattttttgaaagaataattaatgtttttatttttttttttaattatttattttttaatttatttttggtattggtttgttttcgttattttattgaattattttattgaaattatttttgttatgttgtaacgtttagtatttaatgtaggtattggtttttgtgtaaaaggaaagtttttttttgaatataatatttttttgtttgttttgttttattttattgtttttttttttttgttgttttgtgttgggcgtttttttgattgagagtatggttgtagatatttttattttgtatttttttttaaatagataaatttaaataatatttgtatatttataattatttttttatatttttagttttgaattgtttttcgaattttaaattagtaaatttagttgttaatttgatgtttttatttgatgtttgatatgtattttgaatttaatatgtttaagattaaatttgtttatttagttatttgtttttttattagttagtacgtggtgttaatgttggttgtggttttttttttttttttttttgagatatagttttattttgttatttaggttggagtgtagtggtataatttcggtttattgtaatttttatttttcgggtttaagtaatttttttgttttagttttttgagtagttgggattataggtacgtttttttatgttcggttaatttttgtatttttagtagagacgaggtttcgttatgttggttaggttggttacgaatttttgattttaggtgatttatttatttcggttttttaaagtgttgggattataggcgtgagtcgttatgttcggtcggttgtgtttttaaatgaagaaatttaagttttcggggttttttgattttttttattttttgtatttgttttattagtaagttttgttttttttaaaatatagtttgtatgtttttatttttgtttatttttattattatttttttgagttttttgggttttaagtaatttttttgtttttttttattttttatatttttgagacggagtttcgttttgttgtttaggttggagtgtagtggcgcgatttcggtttattgtaagtttcgtttttcgggtttacgttatttttttgttttagtttttcgagtagttgggattataggtattcgttataatgatcggttaattttttttttttttttgtattttttagtggagatgggttttattatgttagttaggatggtttcgattttttgattttgtgattcgttcgttttggttttttaaagtgttgggattataggtgtgagttattgcgtttggtttatttttatttttatttttatttttttgagacgtagttttattgtgtcgttaggttggagtgtagtggcgcgattttagtttattgtaattttcgtttttggagtttaagcgatttttttgttttagtttttttagtagttgggattttaggagtttgttattgtattcggttaattttttgtattttatttttagtagagatggggttttatttttttgattaggttggttttgaatttttgattttgtgatttatttatttcggttttttaaagtgttgggattataggcgtgagttattgcgttcggttttttgtttttttttaattttgcgaattattatattgttttatcgtttttataattgaatttatattgttttttgaggtttattatgttttttaggatttggtttttgtgtttttttttttgattattatagttttgttggtttgtttttgatttttttttttttttttttttttttttgagatggagttttgtttttgttgtttaggttggagtgtaatggtacgatttcggtttattgtaattttcgtttttcgggtttaagcggtttttttgttttagttttttgagtagttgggattgtaggtatgtattattaagtttggttaattgttttgtatttttagtagagacggggtttttttatgttggttaggttggtttcgaattttcgattttaggttatttattcgtttcgattttttaaagtgttgggattacgggtgtgagttattatgtttggcgtttgtttttgtgtttataatatgttaagattgtttttattgtttagaatgttttgtttttagatttttatatggttggttttttattttttaaatattggttttaaatagtaagtttttaaagagattttttgttatgattgaatttaagaaaagttttttagttattttttattattttgttttattttttttatagtatatatttttatttagtagtttttggtttatttgttaatttattgattatatgtttttttttataggagtgtaagttttttgagagttagattgttttgttttgtgttatatttttagtatttgaaatgatgtttgttatgtagtagatgtttagtaaatattttatggaataaatggatatttaaggggatagagtaaattagaattgttaaaatggaatagattgtttgaagaggtagtaaatttttatttttggaagtgtttagggagagattgaaggattattggtagtggagtattttgaataggtttttttttttgttttttttgtttttaatgtatttgagagatgtgatatttttattagtaatataggttttggaaagttgataattttttatttggaggtggtttattagattttgtaagtggtgagtatattttggaaagttttttacgtgattagtacgtttttttaagtatggttattttttattattttttgggtattgtatatattaaatggggtgttggtgtttatgatttttgaggttttttttaattttgtgggattttgatttatatgtttttattgaaataatttggttattatgattataataataataatattaatttattattttatttatttttatggataattttttttttttttttttatatttttttaaaatttaatatcgtgttttttattttaatgattattattaatagttttttatttttttagatttttttttagattttaattgaaatgataagataattatgtatattattatatgtaaataaaatattttattttttttttgagacggttttgatttgttttttaggttagagtgcggtggtatgattgtggtttattgtagtttgtaatttttattttttgggtttaagtaatttttttattttagtttttcgagtagttggggttataggtgtgtgttattatatttggttaattaaaatattttttttgtagagatagggtttttttattttttttaggttggttttaagtttttgggtttaagcgatttttttattttggttttataatatgttggggttatagttgtgagttattatgttttggttaagtgaaattaggaatgggttgggtgtgggggtttatgtttgtaatttttatttttaggtaagtagaggcgggaggattgttgggtaatatagggagattttgtttttattaaaaataaataaaaaaattagttaggtatggtggtgtatgattgttgttttagttatttagggggttgaggtgggaggattgtttgagtttaggaggtcgaggttgtagggagttatgattgtattattgtattttagtttgggcgatggagtgagattttgttttaaaaaaaaaaaaaaaaaaaggattggtttttttttatttaataagttttagatatgtttgttgttaatgtatagagaatttattttatttttttgaataattgtatgggattttattgtatgttagttgtatagtttaatttttttgatgtttagattgttttaattttttttttaattttataaatatatttttagaatgtttttgttttgtaagataaatttttttgttaaaaggtaaaattattttaaatattaatggatattgttagttgtttttttaagtggatgaatgaatttgtattttttatagtaggggtttatattggttatttttgttttagttattgtttttaatatttttaagggtttggatatttgaaaggattaatggtgtttttatggtgtttatatgtttaagtataatgaaaattgttgttatggtgataggttttggagaattagtttgatagttttttggtttttggattagatttgtttgttgtttttttttagttaatgatgggatgatgttagtttgaagcgagtttaggtttttttaagtaatgtaataatttattataggtataaagatatttcggaagagtgtatttttggaattgtttgtttttttttttttgttaatggtgattgttagaatttttaaggggatggagtgtggtagtggagagtttttatgaattattttttttaggttttttgttttttttgagataaataagtagttgttagaatttcgagattaaagatagtttatcgagaattgtgaggtttttaagaatgagcgtgttatttttataaattttgttatttattaaatgaatattttattagaaaataatttatatttttataattttttattatttagttcggattttttgttgttgttttaagtgtatttttatttaggtataattagaaatttttaaattagtagataagagagttttgtgggttttttggttatatatttttttttttgagaaagtttttaggttttagtgtaattttgagaagtaatatttttttttttttaatagagtgcgaaatttaattgtataatttgataaatttttaaatgtatttgtttaattattatttagattaagatgtaggatattattagtattatagatgtttttttgtatttttttagttattttttttttgtgaaagataaaaattattattttgttatagattggttttattaagttttaagttttttgtatatggaattatatagtatatatttttttgttttgttttgttttgagacggagttttttttgtttaggttggagtgtagtggcgtaatttcggtttattgtaatttttattttttgagtttaagtaaatttttttgttttagttttttgagtagttgggattataggtgcgtgttattatgtttagttaatttttgtagtttttattagagatggggtttttttatgttggttaggttggttttgaatttttgattttaggtgatttatttattttggttttttaaagtgcggggattataggagtgagttatcgtgtttggtttttgttttattttttaatttttttttttttagatggagtttcgtttttgttgtttatgttagagtgtaatggtacgattttggtttatttttatttttatttttattaatttttttgttttattgttttagtttgttaagtaattgggattataggtatgcgttattatgttcggttaattttgtatttttagtagataaggggtttttttatgttggttaggttggttttgaattttcgattttaggtgattcgtttgtttcggttttttaaagtgttgggattataggcgtgagttatcgtgttcggttttttttttgtttgtttttggttaagataaaatatgataaaatttattattttaattatttttaagtgtatagttttgtggtattaagtatatgtatattgttgtaaaattattattattatttatatttagaatttttttgtttttcgtaattgaaatttagtttttattaaatagtaattttttatttttttttttgttagtttttggtatttattattttattttttgtttttaggagtttgattatttttgatgttatataagtgaaattatatggtatttgtttttttgttatggtttatgttatttaaaataatgtttttaagatttagttatgttgtagtaggtattagaatttttttttttttaaggttgagtattttattgtatgtatatattatattttgtttattcgtttttttgttgatatttgggttgtttttattttttggttattgtgattaatgttgttatgaatatgggtatgtaaatattgtttgagagtttggttttattttttatttttttaattttttagatggagttttttttttgttatttaggttggagtgggacggagtgatgtcggtttattgtagtttttattttttgggtttaagcgatttttttgttttagtttttttagtagttgggattataggcgtttattattacgtttagttaatttttgtatttttagtagagacggggttttattatgttggttaggttggtttcgaatttttgatttcgggtgattcgtttggtttagttttttaaagtgttgggattgtaggtgtgaattattgtgtttggtcgagattttgtttttattttttttggatatgtatttagaagtggaattgttggattatatgatatggtaattttgtttttaatttttttgaggaaacgtagtattgttttttatattggttattttatttgatttttttatttgttagtgtataagggttttagtttttttgtatttttgttaatttttgtttttttgatattagatattttaatagatgtgaggtgatatttcgttgtaattttgatttgtattgttttagtgattaatgatgttgagtatttttttatatgtttgttggttatttttatattttttttggggaaatgtttatttaagttttttgtttattttaaaatttggttattattttgttgttaattgtattgtaggggtattttaatatattttgatattaattttttattagataagtgatttgtaaatatttttttttatttcgtaggtgtttttttattgttgtgttttttattgtatttttattatagaagttttaaattttgatatagtttaatttatttatttttattttgttgattatatttttggtgttatatttaataaattattgttaaatttaatgttataaaatttttgttttgtttttttttaagagttttttagtttttggtttttatttatttcggatttaggtttttgattcgtttcgagttaatttttgtagtatatggtataaggtaagggtttagttttatttttttgtttatggatatttagtttttttagtatcgttggttgagaagattgtttttttattgagtggttttgttagtttggttgaaaattatttgattttgtatacgagggtttttgtgtgttttttaaaaaataaagtaattaaattgatttattttttaattgtagtaaatgtatttttaaaataaatttataatggaaaatttgaattattatttttaaatagaaggttatattaaaaatattatggagttaggtagatgtgtttattcgtgtttgtggttttagttgtttaggaggttgaggtgggaggatcgtttgggttttagttcggtttgggtagtattattagattttgttttttgtcgagtttttagtggttttgtgtggttgtattttagaatattttttatttaattgagggggtatatttgtttttttagtatatatatttaggttttgttttgtggtttttgtgtgggagttgggtttttttgtttttggttttttttgggtatttgttaggttttagttggtttggttagttagtgtgtattttttaagttttgttcgggtacggtggtttatgtttgtaattttagtattttgggaagtcgaggtaggtggattataaggttaggagttcgagattagtttggttagtatggtgaaatttcgtttttattaaaaatataaaaaattagtcgggtatggtggcgtatgtttgtagtttcggttatttgggaggttgaggtaggagaattgtttgaatttagtaggtggagattgtagtgagtcgagattatgttattgtattttagtttgggtgacggagcgagattttgttttcgattttttaaaaaataaagtttttgattgtgttgtttaatttatttgtgtaatttatttatttttgtgtatagtagaagtttttttttattgtagtataatattttattgtttgtatatgttataatttatttattttattgttgatagatattagattgtttttagtttggggttatttgggtattatttttgtgtatgttttttgatgtatatatgtatttatttttgttagagtagaattgttgggttttcgggtatgtttgtgtttattagtatatttattttatatttttatataattatttttttgtgttttgttttttgtgtagt

SEQ ID NO: 32 - DNA, 18997 bp, Artificial Sequence
  chemically treated genomic DNA (Homo sapiens)
attgtataagaagtaaaatataaaaaaatgattatatagaagtataaaataaatatgttaatgaatatagatatattcgaggatttaataattttattttaatagaaatgaatgtatatatatattaaagggtatatatagaaatgatatttagatagttttaaattggaaataatttaatgtttattaatagtaaaatggataaattatagtatatataaataatagaatattatattgtaatgaaaaagaatttttgttatatataaaaatggatgaattgtataagtaagttgggtaatataattaaaaattttattttttggggagtcggggatagagtttcgtttcgttatttaggttggaatgtagtggtatgatttcggtttattgtaatttttatttgttgggtttaagtaatttttttgttttagttttttaagtagtcgggattataggtatgcgttattatgttcggttaattttttgtatttttagtagagacggggttttattatgttgattaggttggtttcgaatttttgattttgtgatttatttgtttcggttttttaaagtgttgggattataggtatgagttatcgtgttcggataaaatttaaaaaatatatattggttggttaaattagttggaatttggtaggtatttagaggaagttaaagataaaaaagtttagtttttatatagagattatagggtagagtttaagtgtatatgttgggggaataaatgtatttttttaattagatgaggaatattttgggatgtagttatatagagttattgagaattcggtaggagatagggtttggtggtgttgtttaggtcggattggaatttaagcgatttttttattttagttttttgagtagttgggattataggtacgggtgaatatatttgtttagttttatggtatttttagtgtgattttttatttagggataatgatttaggttttttattataagtttattttaaaaatatatttattatagttaaaaaatgaattaatttaattgttttgttttttaagaaatatataaaaattttcgtatataaaattaaatgatttttaattaaattgataaaattatttaatggggaaatagtttttttaattaacgatgttgggaaaattggatatttataggtaaaagaatgaagttggatttttattttatattatatattataaaaattaattcgaaacggattaaagatttaaattcgaaatggataaagattaaaaattaaaaaatttttagaagaaaatagagtaaaagttttatggtattggatttagtaatgatttattggatatgatattaaaagtatagttaataaagtaaaaatagataaattggattatattaaagtttaaaatttttgtgataaaggtataataaagggtataatagtgaaaaggtatttacggaatggggaaaaatatttgtaaattatttatttgataaagggttaatattagaatatattaaagtatttttataatgtaattaataataaaataataattagattttaaaatgggtaaaggatttgaatagatatttttttaaagaagatataggaatggttaataagtatatgaaaagatgtttaatattattaattattagggtaatataaattaaaattataacgagatattattttatatttattaggatgtttagtattaaaaaaataagagttggtaagaatgtagagaaattgaaatttttgtgtattaataagtgggaaaattaaatagggtagttagtgtgaaaaatagtattgcgtttttttaaaaaaattaaaaatagaattgttatattatataatttagtaattttatttttgggtatatatttaaaagaagtgaaagtaggatttcggttaggtatagtggtttatatttgtaattttagtattttgggaggttgaattaggcggattattcgaggttaggagttcgagattagtttggttaatatggtgaaatttcgtttttattaaaaatataaaaattagttgggcgtggtggtaggcgtttgtaattttagttattagggaagttgaggtagaagaatcgtttgaatttaggaggtggaggttgtagtgagtcgatattatttcgttttattttagtttaggtgataagagagaaattttatttgggaggttgggagggtgggggatggaattaggtttttaagtaatatttgtatatttatgtttatagtagtattagttataatagttaaaaggtgagagtagtttaagtgttagtagaagaacggataagtaaagtgtgatgtatatatataatggaatatttagttttaaaaggaaggaaattttgatatttgttataatatggttgaattttgaggatattattttaagtgatataagttatgataaagggataaatattatgtggttttatttatatgatattaagagtagttaaatttttagaaatagaaagtggaatggtagatgttagggattgatagagaggaggatgaggagttattgtttaatgggaattgaattttagttgcggaagataaaaaagttttggatatggatagtgatgatgattttataataatgtatatgtatttaatgttatagaattatatatttaaaaatggttaaaatggtaaattttgttatgttttattttgattaaaaataaataaaaaaaaggtcgggtacggtggtttacgtttgtaattttagtattttgggaggtcgaggtaggcggattatttgaggtcgggagtttaagattagtttgattaatatggagaaattttttgtttattaaaaatataaaattagtcgggtatggtggcgtatgtttgtgattttagttgtttggtaggttgaggtaatgaggtaggagaattggtggaggtggaggtggaggtgagttaagatcgtgttattgtattttagtatgggtaataagagcgaaattttatttaaaaaaaaaaaaattaaaaaataaaataagggttaggtacggtggtttatttttgtaattttcgtattttgggaggttaaggtgggtggattatttaaggttaggagtttaagattagtttggttaatatggggaaattttatttttaataaaaattatagaaattagttgggtatggtggtacgtatttgtaattttagttatttaggaggttgaggtaggagaatttgtttaaatttaggaggtggaggttgtagtgagtcgagattgcgttattgtattttagtttgggtaagagagatttcgttttaaaataaaataaaataaaaaagtatatgttatatgattttatgtataaaaagtttaaaatttggtaaaattaatttatggtaagatagtggtttttattttttatagggagaggataattgggaagatgtaaggaggtatttatggtgttggtaatgttttgtattttgatttggatagtggttagataggtatatttaaaaatttattaagttgtataattaaatttcgtattttgttaaaggaaaaaaaatattattttttagagttatattgaaatttagaggtttttttagagaaaaaaatatataattaaaaaatttataaagtttttttatttgttgatttaaaggtttttaattatatttagatggggatgtatttgaggtaataataaagggttcgggttgaatgataaaaagttataaaaatgtgaattattttttaatagaatatttatttaatgggtagtagagtttataaagatagtacgtttatttttgagaattttatagttttcgataaattatttttgatttcgaagttttagtagttgtttatttgttttaaaaaaggtagaagatttaagagagataatttatgagaattttttattgttatattttatttttttgaagattttaatagttattattgataaaaaaaaaaaaataggtagttttaggaatatattttttcgaagtatttttatgtttgtgataaattattatattgtttaagaaaatttaaattcgttttaggttagtattattttattattaattaagaaaaagtaataaataaatttaatttaaaggttagaaaattattagattagttttttagagtttgttattatggtaatagtttttattatgtttaaatatgtaaatattatggaagtattattgatttttttaggtatttagatttttaaaaatattaaagataatgattgaagtaagggtaattagtgtaaatttttgttgtagaaagtatagatttatttatttatttgggagagtaattagtaatatttattaatatttaaaatgattttattttttgataaaggaatttattttatagaataaagatattttgaaagtatgtttgtaaagttgaaaaaaaaattaaaatagtttaaatattaaggggattaaattatataattgatatgtaatgaaattttatgtaattatttaaaagaataaggtaaattttttgtatattgatagtaaatatatttaagatttattaagtgaaaaaaagttaattttttttttttttttttttttgagatagggttttattttatcgtttaggttggagtgtagtggtgtaattatggttttttgtagtttcgattttttgggtttaaataatttttttattttagttttttgagtagttgagataatagttatgtattattatgtttagttaatttttttgtttgtttttggtaaagataaggtttttttatgttgtttagtaattttttcgtttttgtttgtttaagggtagggattatagatatgagtttttatatttagtttatttttaattttatttggttagggtatggtggtttataattgtaattttagtatgttgtgaaattaaggtgggaggatcgtttgagtttaagagtttgagattagtttgggaaagatagggagattttgtttttataaaaaaaatgttttaattagttaggtgtggtagtatatatttatggttttagttattcgggaggttgagatgggaagattgtttgagtttaggaggtagaggttgtaggttgtagtgagttatagttatgttatcgtattttggtttgggagataaattaagatcgttttaaaaaaaaagtaaaatattttatttatatataatgatatatataattattttgttattttagttagaatttagaaaaaaatttgaagaaatagaaaattattaatagtggttattggagtaaagaatacggtgttgagttttgaggaaatatgagggaaaaaaagaaaaattatttatgaaggtggataaggtaataaattgatgttattattattgtgattatggtaattagattattttaatgaaaatatatgaattagagttttataaagttggaaaggattttagaggttataaatattaatattttatttgatgtatataatgtttaagaggtggtagggggtggttatgtttggggaggcgtattaattacgtgggaagttttttaaagtatatttattatttatagaatttggtaagttatttttagatggagaattattaattttttagagtttgtgttattgataaggatattatattttttagatgtattggaaataaaaaaggtaaaaaaaaaagtttgtttaaaatgttttattattaatgattttttagtttttttttgggtatttttaaagatggaaatttattatttttttaagtagtttgttttattttagtaattttgatttattttatttttttaaatgtttatttattttataaaatatttattaaatatttattatatgataagtattattttaggtgttaggaatatggtatagaataaaatagtttggtttttaaggaatttatatttttatggagagaaatatataattaataagttaataaataaattaggaattattaggtagagatatgtattatgaagaaaataaaataggataataaagagtgattgggaagttttttttaaatttaattataatagaaggtttttttaagagtttgttatttaagattaatatttgaaagataaggaattaattatgtaaaaatttgggggtagagtattttagatagtaagaataattttgatatgttataaatataaggatagacgttaggtatggtggtttatattcgtaattttagtattttgggaggtcgaggcgggtggataatttgaggtcgggagttcgagattagtttgattaatatggagaaatttcgtttttattaaaaatataaaataattagttaggtttggtggtgtatgtttgtaattttagttatttaggaggttgaggtagaagaatcgtttgaattcgggaggcggaagttgtagtaagtcgagatcgtgttattgtattttagtttgggtaataagagtaaaattttattttaaaaaaaaaaaaaaaaaaaaaaaaaaattaaggatagattaataagattatagtgattaaggggaaggatataagggttaaattttgaggggtatggtaagttttagaaaatagtatggatttagttataagagcggtggaatagtataatggttcgtaaggttaaaaagaggtagaaggtcgggcgtagtggtttacgtttgtaattttagtattttgggaggtcgaggtgggtggattataaggttaggaatttaagattagtttggttaagaaggtgaaattttatttttattaaaaataaaatataaaaaattagtcgggtgtagtggtaggtttttggaattttagttattagggaggttgaggtagaagaatcgtttgaattttaagggcggaggttgtagtgagttgagatcgcgttattgtattttagtttggcgatatagtgagattgcgttttaaaaaaataaaaataaaaataaaaataggttaggcgtagtggtttatatttgtaattttagtattttgggaagttaaggcgggcggattataaggttaggagatcgagattattttggttaatatggtgagatttatttttattaaaaaatataaaaaaaaaaaaaaaattagtcggttattgtggcgggtgtttgtagttttagttattcgggaggttgaggtaggagaatggcgtgaattcgggaggcggagtttgtagtgagtcgaaatcgcgttattgtattttagtttgggtaatagagcgagatttcgttttaaaaatataaaaaataaaaagaagtagaagaattatttaggatttaaagagtttaggggaatggtagtaaaaatggatagaaataaagatatataggttatattttggagaagatagagtttgttgatgaaatagatgtaggagataagagaaattaagggatttcggaaatttaaatttttttatttaaaaatataatcggtcgggtatggcggtttacgtttgtaattttagtattttgggaggtcgaggtgggtgaattatttgaggttaggagttcgtgattagtttggttaatatggcgaaatttcgtttttattaaaaatataaaaattagtcgggtatgggggagcgtgtttgtaattttagttatttaggaggttgaggtaggagaattgtttaaattcgggagatggaggttgtagtgagtcgagattgtgttattgtattttagtttgggtgatagagtgagattatgttttaaaaaaaaaaaaaaaaaaaattataattaatattgatattacgtattaattggtgaagaggtagatggttggatgagtaggtttgattttggatatgttaagtttaaggtatatattagatattaagtgaagatattaagttggtaattggatttattaatttggaattcgggggatagtttaaaattaaaaatataaaggagtagttgtaggtatataggtgttatttaagtttatttatttaaaaaaaaatataaagtgaaggtatttataattatgtttttagttagagaagcgtttagtataaaatagtagaaaggaaaaagtagtgaggtgagatagaataagtaggagagtgttgtatttaagaaaaaattttttttttatatagaagttaatatttatattaaatgttaaacgttgtaatatggtaagagtagttttagtgaagtaatttagtgaagtagcgaggatagattaatattaagagtgggttaaggaatgaatagttaagggaggaagtaggaatattaattatttttttaagaaattttgtaatgatggaaaggaaatgggatggtagttagaagattatttgtggttaaacggattttttttaaatagataatattagaatatgtttgtatgatgggaatgatttaggagagaaatagaaattaatgatacggaatagaggaataattgtagaagcggagtttttgagtgagtaagggaagattggattttttgtataagtagagtttttataggaaagagatatattatttattatgagaagttagagagtatgggtataaaagtaggtgatttgttatgatttagtggtgaaaagatgaaggaatttttatttattttttttttttagtgaaaaaataaaagtaagattattaattaagaataaaggaaaagaggaaaaatagagtgatttatgaagtttattttaggaaggcgaatgtataagagaaatattattgtaggattattaggtagggttggatgtatattgtgtttttatttttattaataattttttattagtattatatttatatttatttgtttgtattttttattaattataaattttgtgagagtagaagttacgtttgtgtgttttatagttgaatttttagtattttggtagagaatttagtatattattgtttattatttttgatatgattataggtttgtttattatttaatatatatagtgtttagtattgaggatggagagatgagaagatagtttttgtttttaagggtttattttttagagagaaggtagatatttaaatatagtataatgttatattttttttatatatatatatataaggtgaaaaaggaatatagaggaaagattttaatttgttggagagttagggaagggttttaaagggtaataagttaggtatagtgttgtgtgtttatagttttagttatttaggaggttgaggtaggattgtttgagttaaggagtttgaggttagtttgggtaatatagtaagattttgttttttttaaaaatagtaataaaaaaaaaaggaaattgtatttgagttgagaagtttaaaaagtgaaggaattttgaaggtagttaagtaaaggtaaatagtttgatatatgagagtgtttagagaatgataagtagtttaatattgttggagtagagtatagaggaggtagaggtaagagatgaagttgtagatagcgaggaagttagattatgaaagagtttgtatgttaaaaaaaaagttttaattttattttgggaaatataaattgtatatgggagtgatataattagatttgtaagttaaattaagtttgtaaatatagtagaagatggattggaaattagaggtcggaaggttagtaaggaggattatagtagtttttataagagatattgagaggttaaaatagaggatgaaaaagtagtaatgatatgaaagatatttagaaataagattattaggtatatgggtggtaaatttttaatttttcggataatagttatgagagataatattaggatttatagatttgatggataattttaaaagaaatgttggattttagtttataatagtttaatagttttcgtgagatagaaaattttggattaggtttttttgttttatagatttaaattggttttgaatttgtaaattaggaaaaataaaattattttttaagataaaattattttatatagattagagaatagaatagatgaaagttgggaaatgaattaaaatttgttttaagattaaagatttattttgaggatagttttaatgttttttatttattttttttaaatagtattttaaatgagtatagtttttagttgggtaaaaaaggaaattaaagggttgttaatattggaatataattttaaaaaagggatagatgtttttttttagagatatttaattataagataaatagttagttattggatgtttgaaatttgttttaaatagaaaaatattttatttttgaggtttttttaaagttaatatattatattttgatgatttaaaatatatataaaaaaagattttttaatgataattttttatttttggtttttttttgaaattatggttaagttttttagttatgagggaatagaagaaaatagattatttttatattattaggtttaataataataggttttttaaaggtttggtagcgttttgaattggtttaaaatgtattggttaatttttaaagagtatatgttaaattaatatatgtagagggaatagaagagaatagattgttaaaaaaaaatagagaagattaaagaatatttttttttaatttattttatatgttaatattaattttaaatttttttttttttttaaaaaagtatttttagtgtcgggtgtggtggtttacgtttgtaattttaatattttaggaggtcgaggcgggcgaattacgaggttaggagattaagattattttggttaatacgatgaaattttgtttttattaaaaatataaaaatttagttggacgtggtggtaggcgtttgtagttttagttatttaggaggttgaggtaggagaatggcgtgaacgtaggaggcggagtttgtagtgagtcgagatggcgtattttagtttgggggatagagcgagatttcgttttaaaaaaaaaaaaaaaagtatttttagaagttttattattatttataggataaagtttaaatttttggtcgggtatagtgatttatatttgtaattttagtattttgggaggtagaggtaggcggattatttgaggttaggagtttgagattagtttgattaatatggagaaatttcgtttttattaaaaatataaaattcgtcgggcgtggtggtatatgtttgtaattttagttatttcggaggttgaggtaggagaattgtttaaatttgggagatagaggttgtagtgaatcgagatcgttattgtattttagtttgagaaaaaagagtaaaattttattttaaaaaaagtttaaattttttggtttggtatttaaatatttagtatttagtattatttaattttttaatagtatcgtttatattttttttttttagtttattggatttttttatttttttgtaataggaaattttataggaaagttagaaattttagtattataaaaaggaataaggttatttttgttaataattaaaataaaggataagcgtttaaattttttattaaaattagtttttagttgatgatttaggttaataaatggtagaagaggtaggatttaggaaagttaatgttgttaaaagaagggtaaattatatttttttgtggtaattaagaattattatgaattttttttttttttgaagttgtttttatttttatagttttattatttgttatttaatagatttggaaattttaattttttttattggttttattattaatatgtttttttattaggtttttttttaatgataagttatttagtttttattggagaggagaaaggtagtttagtttgttaatttaattttagttataacgggtttaaaaataggttttggtataagtgaaagttatttgtttaaaaaaattttttggttttattatattgataatttataattttagtttatgtttattttttagtaaattatattttttaaagtatttatgaaaaattattttagattttagaggtttatgaaggtagggtgatttttatatggagaaggtattttttttaaaattagtttttagattttgttttgtttttatttttttagatttggaaataaaaatattaaataaaattaaattaaaagtttttattaaggtttttttttcgggttggttaataaaaatatatagtatcgtggtagagggcggtgggtgggtggtggagaatatttagagtaaaggggtagtgtatttggtcggatgatggttaatatattttgaaggtaaggacgttattatagataattaggttttggttatttaggataaaagttaaagatggtaattaaatatttaattaaaaggttaatttgtaattttagtatataagttattagatttttagatttgttttaaattttaagaaatatttttggtgtgttagaataatgtaaatgtataataagtattttataggtttgtaattttaagtatagtattattgttattagattttttttttttttttttgaggttgagttttatttttatttaagttgaagtgtaatggtacgatttcggtttattataatttttatttttcgggtttaagcgattttgttttagtttttcgagtagttgggattataggtgtgtgttattatgtttggttaatttatgtatttttagtagagatggggttttattatgttggttaggttggttttgaatttttgattttaagtgatttgtttatttcggttttttaaagtattgggattataggtatgagttattgtgttaggtttttagataattttaatgttgtattttgtttgtattttaattagattataaattttttacggataaagaatatgtgttaaagtttttattataatgttttatattggattgaaaatataattgatgatttgattgatgattatattgaaaagaaattatgaatgttggtatgtttttaaagttaaagtagtaggtgatattagtgatagaggttacgtttgtttttagtatttattgaattttcgttgggtaagaaaagttagattttaataaaaattgatggagattgttttcgttaaatatagtagtttataaggttattaaattttggaattaaaaggaaaaataaggttaaaatagagttatgtgaataaaaattgggtttaggatagtgaaataatagtttttttaataagaaaaaaagtagtagtagttaaaaggtaaaattaagtaaaggatgatttaataagaaaagtattagtatttatattttttgtatttttattgaaacgttttatcggagattggtaatgattaggttaagatgatagagatgatttaaggttgggttttttatttgaaaagtttattaattttagagttgtgttaaatttaagttaaagttggaatagggtttttttcggattaatattaagtgaagtggattattaagtggagtagcggtacgaaggtggtttttttagatttttaagtttaatttttacggagtcgtttggtattaggtatataatttaagttttttgagttttaatttttttatttataataaaagggtaatgtaggttttttttataattttaaggggcggtggtttgatatagagtattatgaaaataaaagtagtatattaaagtaatatattattattatgattatttatagaattattattcgttaggatgaaattttttatataagagatgaagttcgagagaaaagagttgaaggggaaggtttttacgaggagatagtaatcgaattgtagcgtttcggttagtagtatatatagtaggtacgcgtttagtaattttagacgttgcggagtggagtttaagtatttttttaagaatcgcgaaatgatagatattatcgacgtcgatataattgtacgtaaggtattttagttcgcgttttaaatttttggaggattcgtcgattatatcggatgtgttgtttgcgtatgcgtattttcgtgatttaatttcgtttttttcggtgtgttaatttgcgtaggcgttgaggtcggttagggcgcgtaataattaatgcgtagacgcggattgtattaatagatttaattataatttagaaaagttaatgcgtttgcgtaatggttttattaatgagttggggacgtgtattttttttgttttgttttcgttcgttagttcggtgacgtttatagttgttttggtaataagatatattgggaggaagaggggaataagttttattggggatcgcgtagttaattagaggtattcggttttttttggtttttttgagttttggaagatttaacggtttgtatttattttgaggtaatgtttggcgtttttggggtttgatattagtttgattttaattttgttaagggcgttgtttgtagatgtttgttatagattattggaataagttaagtttattcgtagtgagattcggcgcggttaattattgtataggttttagtttagatttaattatttgggggagtgagtgggtgtggtgaggggcgggaggtagggaggaagtttgattttagtagggttttgaattggaattcgggatttggttttgtaatgttaatatttattgggcgtttttttggggtttgacgttgtattaatttgtagggatttttacgtgaattagatatatttgtagttttaaaagagttggtgaagggagggatagttgtcgaatgtcgtgtaaaaagtatatggttaagtttagtagtttttttttcgtaagttggtattttgaatttggtgtaatatttcgggatgttagcgtcgaaaggttcgaaagagtatgtttggtttaattttattttttttaatttattttgtagaagaaattgaaatggttttaggttttgtattttaataagtgggattattttgagggttttaattgtttttttttttttttttttgagacggagttttgttttgtcggttaggttggagtgtagtgtcgcgatttcggtttattgtaattttcgtttttttagtagttgggattataggtacgcgttattacgttcggttaatttttgtatttttagtagagacggagttttattattgttagttaggttggtttcgaatttttgattttgtgattcgttagtttcggttttttaaagtgttgggattataggtatgagttattgtattcggtttgttttaattttttttaagaaattaagttttggttttcgttgtttttttaattttacgtgaattcgattttttagatttagtttattttattttttagttgtaagtttttttatatatgattaggtattttatttttagttttttaatattttgaattgtacgtgagtaaaatttttaaaatagtaggtgaataatagcgtttttgtttttttattttttttttttttttttttgagatgaagttttgtttttgttatttaggttggagtgtagtgaatggtgcgatttcggtttattgtaatttttattttttgggtttaagttatttttttgttttagtttttcgagtagttgggattagaggtatttgttattacgttcggttaatttttgtatttttagtagaaacggggtttcgttatgttggttaagttgattttgaatttttgattttaggtgatttgtttgttttagttttttaaagtgttgggattataggagtgagttattgcgtcggtttttttttattttttatttgtttttagattggaaattttatacgtattaattaacggatgtattattagtggtgattaaagttttatttaagttttagaaagaagagaaataatttaagaaatttttagagtttatttgaatagatagatttatatttatattcgtggagatttgtgtagttatatgaatataagtttagtttaaatttatgttgttgagaaagaaaaaaaaagagtggataataagttggtttttattttaatataatatggtaggaagtattaatttttttgataagttgaatttttttttttgttttattaataagtaggagggtagtttttttacgaatatttaattttaaattttataggttaggttgatgttttttaattatttaggtgtggattttttagggagtttttgttttattagttaggttttttttagtgtttttttttttatgttttgtttgtttttgatttatgttaattattattattaagatttttttaggaatttttataggagagaagaagagatgaaaaatattaaatggatttattgaatgtatttgtttttgagatttgttagttatattaatatattatattagggtttttttgaattatttaaaatagtaagaaaaggtttatttttttatttagtttatgattttataattattgaaatatttttaattgatttgttaataggaaattgttaatattagtgttgattttaattagtttaaattagaatattaatatagtttaaaatttttgtttagagtagtggataagagtgtaagttttagaattagatagttttaggtttgaattttgattttgttgtttattagttgtttaatttggaataagttatttagtttgatagttttattttttttttttataaaatagaaataataatatttggtttattgaaattatgtgaggattaaatgagataatgttaagtattaagttgttagtatagtgtttggtagatagtaaatgtttagtaaatgtttgtttttattaattattattaattttagtaattaattatgtttgttttttttagttttttgaatgattaaaagttagttaaattatagcgtttttaataatttgggtatgtaaaagatagtattggagggattgtaatttaaatggtttttaaagggtagatttaatttataagttgaaattgaagttagagtatattttaggggttttattatataaaataatggaagagtggaggagtaagagggtttttttaagggtaaagtttatgattttatattatatattttttataaaaagaaattatattatttattaaaagaaatataaattttttaaagtttgagtagataataatttttttaaaggaaattttcgtatggaaaagaatgttttttttatttttttttttttgtattgttacgtttgttttaagatttttttttttgtttttgttaattgttattgtatatataatttttattttttaaattttggttttagtgtgattaaaattttttttttttgttttttaatagaatagataaaataggttattatttttagaaataaaaatttaaggagaattaagttgtaaatagtataaagttaaatttttaaagtattaagtttttgattaagttttagtaaagtagtaaatatttttagtgaatttatatttttttatttttttagtttttgatgaagtggaataattttttagtttttttgtttggttttttttttttttagttgtttgggagttttaaaaaagttttagttttgtttttttgttggtattcgaaagtgagtttattatattgttttttttaagagtagattatttattataatatggggttgaaattattagtgtttgagtaatagtgtgtaatagaattttttgtgataatgtttttgtattgtttagtatagtaattgttagatatatgtggttattgagtatttaaattagttagtgttgtaatttaaatgtaggtttattttttcgttgtttgtagagtttatttaataagagtgagatttggtataaagaaaatgatattttattttaaagttattttaggggaggaagtattggttttttgttttaagggtattattttatttttggagtagaaagagggtgtttttgaaatggggtatggaatgttggtatgaatggtacgaggggaggaagcgagtggttggggggtttgtatattatttttagtgttttatttattggatagtgattgttggtgttttttgtgggtaggattgggttgtaaaagtggttaaaattttttaggtaagagaaagttttgtagtaggtatattttgggttgtagataggttgttgttttttaaggtaatttttcggtgggtgagagtttttttttggagtttttaagtatatagttagatgaatttgttttatagggagtgtttgataaagaggaggtaaaaggttataattgtatttttaaagagttaaggaggaagtgaggagaagggggaaaagaagagagattttttaaaaattattaaattattttttagaaaaatggggatatttggttatagtgtgattaaggaaattttatttggtttttatttaaatttaagtagttatttgtggttagtggttgttattggatagaataatttatgagttattttatttatttttatgtttagttaaagagatatattttgtttatagtttatttaaatggtagtgatatttatttgaaataagaataatttatagttgttaggtttgagttattagtttattagttttatttatttttggaatatttagtgatgatttatagttatagaaagagggtttgtaattttttaaggagtttattttgttcgttgtttagatagagttggtttattaagattgggtaattagaatggagaaagagtaatttatatatagttagttgtgtaggagaacggaattttattattatttaaattagtttttttaagtattcggggattagagtttttaaggataatttggttggggaagttagtgagttacgagttttgatggtcggggatgaaattataaggagttaaagttgtttttttgttttgagtttttgggtggggggcgttgtaagattagatgagttagtttattaatttgagtggtattagttgatttattaagtgtaggggttattaaatat

SEQ ID NO: 33 - DNA, 5001 bp, Artificial Sequence
  chemically treated genomic DNA (Homo sapiens)
aagtttaaaagataattgttttagtatttaatttaaaaaatataaattagttagatatagtggtgtgtatttgtagtcggagttatttaggagattgagataagaggattatttgagtttaagggtttgagattagtttgggtaatagcgagatttagtttaaaaaaagaaaaaaaaacgttaataataataaaaaaatttattcgtttattaaattatttgtaaggcgtttgaatgaaaggtgttttttttattgtggttttgtttagggtatttatagttgtaggtgagttaatttgtttggttttgttttttttaggtttgtttttttatgatttatttgtgtgagaaaattatttttacgttgtttttttggaggaagtttaatggatttaattagttgatgtcgttgtagtagtttgtgtacgacgtgtaggattagttgaattttttggttagcgaggaggattttaggcgtattgtttagtagttttatagtataggcgaggtgagtttttgggagtttaggtagggggtcgtgagaggtgttagggatttagtttgttttaaattttagtttttggaagtggtgtgagtttggggaagtagtgtggaaatggtttagttaatttataatatttttatacgtgtgataaatatagttttaagtgacgttttgaattgtagttttcggtttattttaggagttgttattttgttttgtcgtgttttgtttttatttttagagtttgttagtttgggagtgtagtgtttattgttttgggtgattgggtttttttttattttttttgggtattaggaatttaatttgttatttttggtagtttttaggatggtttttttgtattagcgtggagttattagttttatatagattttttgggtgggaaaatagttgagaaaaggtagtgaggtgtttttgtggaggtaatgtttggagatataaagatagagaattttggtgtatagatatatagagtaattataattaaagatgtatattaaaaaattttagtaagtaatgtttagtagaaatgattgagaatgggaggttttgttttggttttgtgatattgagtattagggcgcggtttggaaattttgttttaatggtattatatgtttgttttaggaacgggggtagtgttttcgtgtttttttattatgtgaaattgggagtttatatgaattagtgtgggttaagaagagcggttttgaatattgtaattaaaagtagttttgagattattaaaagttagatgtttatttttttaattttaggtgttaggtttggttttatagttagtttgtatgagttatataaattttttgaaattaaatttgaatttataagttagtgattttgaaaattggagtcgtcgggtagtaattttattagtttttaaatttttagttaaatggttagagaatttgttaatttatttaggaatattttaaagtgattgaatttaaggaagaatataggtgaaggattatattttagatgataagatattgttggatgtaaaaaatgtgttaattttaattttaaatttttttggtataggagttttttgttttttagtagtagattagtaattttttagattatattatatagttttttttatttgttattatatttttgtttgtttttgagagtttagtaagtaaatgaagatgtaaagaaggagggtaattaggtagtaggaattatattgtgtggttcgattttgattggtttcgggttttttttagatttgtttttcgtatttaatttgtagatttttagaattttttagtggtttttttgattttgttttttggtttagggttttatattacgtttagttgattgttttagttttttgtttttttttattatgggatagtttcgttttttttgagtttgaggcgatgagtagtgtttaggattaaattgtaaatggtattttagtaaatgttgtattaggaattagattaatattggttttgttttttagaatttttaatttaggtttaattttgaatagatttttagatagggggtattttttaggtttaagttagattgtggtaggaaattattgtgtggtttcggtggggttagagtttttaagtgagggagtttagggcgatggttattttttaagaaaggaagtagaatttttttataaagggaaagttttttttgttttttgttattttttttttttttttttttatttttttaagaaataaatataattaaaaagttaaagtttttttgggttattatttttggttttatttttttttttttttttcggaggttaattattattatggtagtatatttttttaggttttttttatgtgtgtgtgttaaatatttatataatggtataataatagaatgttttgatttttttttgaaaatgtttttaagtttttagagaagttgtaaggatagtattatgaatttttatataggttatatttatttatttttttaattaattaattaatttttttttttttttttttgagatagagttttattttgttgttaaggttggagtgtagtggtataatttcggtttattgtagttttcgttttttgggtttaagtgattttgttttagtttatagatataagttattatatttaattaaattttgtatttttagaagagatagggttttattatgttggttaggttggttttaaatttttgattttaagtgatttattcgtttcggttttttaaagtgttgggattataggtatgagttacggtgtttagtttattatatttaagttgattagttgttgatattttgttatatttgttcgattttttttttttttatttatttatttatttattttgtagatatgatgatattttttttttaaataatttagtttatattttttaaggagaaggatatttttttatataatttaatataattgatgattttagaaatataatattaatatagtattatgattgaatatattatttttatataagggtttgttattggttttaataattttttttaaagttatttttatttatgtatttattttgggatttagaatttagtttaaaattatttattgtatttggttgttattttttatttttttttttttttttatttcgttggtttttttgaagattttaggggagttgttttttagaatttttattttgatatttttaagttgtttttttttattcggtgtttggtttttgagacgtatttacgtggaatggttttgggttattttttagagtatttgtttagtttttgttgtcggtattaggttttttagtgttttaagtggttggtgtatttggttagggttttgtttttaagcgtgattttttgttgttttttcgtagattaatattatgtaaagtgaaatagtttaggacgtgttgtttttggattttcgttggttttgtataaacgttttggggaagttgttgttcgtggagattttacgggcgttgtattattatcggggtcgttatatcgtggaggatatttagcgtttggtgttcgatagcgacgtggaggagttgttgtagattttcgatgttatggatatttgcgttcgggatttgagtagcgggattatggtggacgttttagttttgattaagatagataatttgtatcgtttttgggttgatgaggaggacgaggtgatggtgtatggtggcgtgcgtatcgtgttcgtggaatattttattttttttttatgtggtattttttataaggtttaggtgaatttgtgtcggtggatttattagtaaagtatagagggcgacgcggatattcgtttgtgggtgaatggttgtaagttggttaatcgtggggtcgagttgttggtgttgttggttaattacggttagggtattgaggtttaggttcgcggtttggagacggagaagattaagtgttgtttgttgttggattcggtgtgtagtattattgagaacgttatggttattacgttgttagggtttttgatcgtgaagtattatttgagtttttagtagttgcgggagtattatgagttcgttatgatttattagttacgggatttttttcgggtatagattttgaaggaaattttattgattaatattatgggggggtataaggaaagttttagtagtattatgtgtttcgggtgttacgacgtttatttataggttagtttcggtatggatatttatgtattagatttgaatttttttattcggaggaaattgagtcgtttgttggattcgttcgattttttggggaaggattggtgttttttcgttatgaatttaggtttttttgatttcgtggtaaagtataatattagtaacggggtttttaaggattttttttttagttttttttacgttttgttgcgggaatggattatttattttgagagtatagtgggtatttttatgtttaaattgagggagttgggtcgtcgggatgtcgtagattttttgttgaaggtattttttgtgtttaaaattaatttggatggtaatggttaggaggtttatgtttcgagttgtaatagcggtattttttataattttattagttttgttgtatttcggtgagggtagtttttggtttgggtagggtttgtttggattgtagaagtaagggggtgatgtagtttatttttttttttggagatgttgagggtgtttttttttgtatttatagttagggggatgttattttttttttcggtttgatttgtttttttgtcgttattttttttttcgttttatttcgttgtttgtggatggttattgtagtttaagagtagaatagattttttattttggtcgtttgaaaagttagtgtatttttttttagtgttttggattttattttttattttttagtattttgttttttattgataattttgttggaatttttaattttttaatgatattt

SEQ ID NO: 34 - DNA, 5001 bp, Artificial Sequence
  chemically treated genomic DNA (Homo sapiens)
aaatgttattgaaaagttaggaattttagtaaaattattagtaagaagtaaggtattggaggatgagagatggagtttaaaatattgagaggaggtatattagttttttaagcggttaaagtaaaagatttgttttgtttttaaattgtaatgattatttatagataacggaatgagacggggagggaggtagcggtagagaaataggttaagtcggagggaggagtggtatttttttggttgtgggtgtaggaagaaatatttttagtatttttaaagggaaggatgggttatattatttttttgtttttgtagtttaaatagattttgtttaagttagaggttgtttttatcgggatataatagagttaatggaattgtaagaggtgtcgttgttgtagttcgaggtataggttttttggttattgttatttaggttgattttgaatatagaggatgtttttagtaaaaagtttgcggtatttcggcgatttagtttttttagtttggatatgagggtgtttattgtgtttttagggtaggtggtttattttcgtagtagggcgtggagggggttggggaggaaatttttgggagtttcgttattggtgttgtattttgttacgaggttagggaggtttaagtttatggcgagaaggtattagtttttttttagggggtcgggcgggtttagtaggcgatttagtttttttcgagtgaggaggtttaggtttgatgtatggatgtttatgtcgaggttggtttgtgagtagacgtcgtgatattcgaagtatatgatgttgttgaagttttttttgtatttttttatggtgttggttagtgaggttttttttagagtttgtgttcggaagaagtttcgtggttggtagattatgacgggtttatggtgttttcgtagttgttgggggtttaggtaatgttttacggttaggagttttggtagcgtggtggttatgacgtttttaatggtgttgtatatcgagtttagtagtaggtagtatttgatttttttcgtttttaggtcgcggatttggattttaatgttttggtcgtggttgattagtagtattagtagttcggttttacggttggttagtttgtagttatttatttataggcggatgttcgcgtcgttttttgtgttttgttggtggatttatcggtataggtttatttggattttgtgaaagatgttatatgggaagggggtgaggtgttttacgggtacgatgcgtacgttattatatattattatttcgttttttttattagtttaggagcggtgtaggttgtttgttttgattagggttgggacgtttattatggtttcgttgtttaggtttcgggcgtagatgtttatggtatcgaggatttgtagtagtttttttacgtcgttgtcgggtattaggcgttggatgttttttacggtgtagcggtttcggtagtggtgtagcgttcgtggggtttttacggatagtaatttttttaggacgtttgtgtagagttagcgggggtttaggagtagtacgttttgaattgttttattttgtatgatgttgatttgcggggggataatagaaagttacgtttagggatagagttttggttaggtgtattagttatttagagtattaaagggtttgatgtcggtaatagaggttgagtagatgttttaaggagtgatttaaggttattttacgtggatgcgttttaaaaattaaatatcgagtggagaaaagtagtttgaaaatgttagaatagagattttgaaaaataatttttttgaagtttttaaaaaggttagcgaaatgaaagaagaaaaaaaaatgggagatggtaattaaatgtaatgagtgattttagattggattttgaattttaaaataagtatataaataaaaatagttttaaaagaaattattgggattagtggtaaatttttgtatgaggatgatatatttaattatagtattatattaatgttatgtttttggaattattaattatattgggttatgtgggaaaatatttttttttttaggagatataggttaaattatttagggaagaaatgttattatgtttgtaaaataaataagtaaataaatagaaaggaaaggaatcgagtaaatgtagtaaaatgttaataattgattagtttaaatgtagtaggttgggtatcgtgatttatgtttgtaattttagtattttgggaggtcgaggcgggtggattatttgaggttaggagtttgagattagtttggttaatatggtaaaattttgttttttttaaaaatataaaatttagttgggtgtgatggtttgtgtttgtaggttgaggtagaattatttgaatttaggaggcggaggttgtagtgagtcgagattgtgttattgtattttagttttggtaatagagtgagattttattttaaaaaaaaaaaaaaaaaaattaattaattaattaaaaaaataaataaatgtagtttatatgagagtttatggtattatttttgtaatttttttaaaggtttgagaatatttttaaaaaagagttagaatattttattattatattattatgtgaatgtttaatatatatatatagaaaaggtttgaaaggatatgttgttatgataatagttggttttcgagaaggggagagaggagtgagattagagatgatggtttaaggggattttagttttttggttgtgtttattttttaaaaaaataaaaagaaaggaaaaaaaagtgataaaaaatagaaggaattttttttttatggaagagttttgtttttttttttggagagtggttatcgttttggatttttttatttggaggttttgattttatcgggattatatagtaattttttgttatagtttggtttaaatttaaaagatgttttttgtttaagagtttatttagaattgaatttaggttgaaaattttggagggtagagttaatattgatttagtttttgatatagtatttgttggaatattatttgtagtttggttttaaatattgtttatcgttttaggtttaggaaagacgaaattgttttatagtggaggagaatagggagttaagatagttagttaaacgtagtgtgggattttgggttagaaaatagagttagaagggttattggggagttttgaagatttgtaaattagatacggaaggtaggtttggaggaggttcggggttaattaaagtcgggttatataatgtagtttttgttgtttaattattttttttttttatatttttatttatttattaaatttttaagggtaagtagggatgtaatgataaataaaggagattatatgatatgatttagaaagttgttggtttattattagaaagtaagggatttttgtgttaaaggagtttagaattagaattgatatattttttatatttagtagtattttgttatttaagatgtggttttttatttgtgtttttttttggatttaattattttaaagtatttttggatgagttggtagattttttggttatttaattgggagtttaaaggttgatgaaattattgttcggcgattttagtttttaaggttattggtttgtggatttaggtttagttttaagaaatttgtatgatttatataaattggttatagggttagatttggtatttgagattggggaggtaagtatttggtttttaataattttagagttgtttttagttgtaatatttagaatcgttttttttggtttatattagtttatgtaggtttttaattttatatggtggagaaatacgaaggtattgttttcgtttttgggataggtatatgatgttattagaatagggtttttaaatcgcgttttggtgtttaatgttatagaattagagtaaagttttttatttttaattatttttgttgggtattgtttgttagagttttttaatgtgtatttttaattatgattattttgtgtatttgtgtattagagttttttgtttttgtatttttagatattgtttttataaggatattttattgtttttttttaattgtttttttatttaggagatttgtgtggagttgatgattttacgttgatataaagaagttattttgaaggttgttaggagtagtagattaagtttttggtgtttagggggagtgaagagagatttagttatttagggtagtgggtattgtatttttaaattaatagattttggaaataaaagtaaaatacgataagataaaatgatagtttttaaggtgagtcgagaattgtagtttagagcgttatttgaggttgtgtttgttatacgtgtggaaatgttgtaggttagttggattatttttatattgtttttttaggtttatattatttttaagagttggaatttgggataggttgagtttttggtattttttacggttttttgtttgggtttttaggggtttatttcgtttgtgttgtggagttgttgagtaatgcgtttgaggtttttttcgttggttagggggtttagttggttttgtacgtcgtatataaattgttgtagcgatattagttggttgggtttattgagttttttttaggaaggtagcgtggagatgatttttttatataggtgagttatgggaggatagatttagagggggtagggttagataggttaatttatttgtagttgtgggtgttttgagtagagttatagtggaaaggatattttttatttaggcgttttgtaggtgatttgatgaacgagtgggtttttttgttgttgttgacgtttttttttttttttttagattgggtttcgttattgtttaggttggttttaaatttttgggtttaagtaatttttttgttttagttttttgagtagtttcgattataagtatatattattgtgtttggttagtttgtgttttttgggttgagtattggggtagttgttttttagattt

SEQ ID NO: 35 - DNA, 6274 bp, Artificial Sequence
  chemically treated genomic DNA (Homo sapiens)
ggattatttgagtttgggaagttgaggttgtagtgagttaaggttacgttattgtattttggattgggtaatagagttagattttgttttaaaaaaaagaaaaattttatggttttgtttatattatttatttgattttatatgttgtttattttttttattaaaatttttagtttattaattatagtttttttataattaatatttcgatgtgataatgttttagtttaattattgtggttataatagaatgttataaattgggtgatttataaataaaagaagttgatttaggttgatttagaggttggggagtttaagagtttggtgttagtatttgatgagtgtttttttgttttattataatatgggagagggtattacgtgtgaagagagtttatttttataatatagttatttttataagaattaatttatcgttatgagagttatgtgaatttatttatgaggatagcgggttaagtttttaatatatggatttttcggggatatatttaaattatagtagttagttgtaacgttcgtgttatgttttattttggttttgatgtttgtgtagtttttttaaattgcgtttttgttttttagtgtgttttgtaatgtggaaatgatatattgggtaagaggagttgtagtaaagaggtttttagtgacgtagtgataagttgtggggagagggagtgttgtatagttttgtcgtatgttatagttttttagtgagtttgtgtttttggattgtgaattttatgtttgttttttagtttttttagttttttagatggtatagaattgttggaggggggtggagttgtatattttttttgttttgggtaggttattttttgataaaatattaggttaggtttttggtgaaataattttttttgagggtagattttttattaataatagaatgttttaatttattttaaaatggttttttttttttttttattgttagaagtataatgagattttttttttaatattcgtggtaaggatttagtagagttttaggaggtaatatttttaagtgttttatattattttgtattatgattgggttttgttggagtttttaatttgtagaattgtttatattgagtttttcgtaattttttaattatagggtaaatttttttagtcggtattgggtttttggaggtttttgtttgttggtttttttttttggaggttgtgtttttgtgtttgtttgtttttttaatttggggggtagtggtttgtttaatgattttaattttttgaaagagttaagaagaggtgttaatttttcggtttgtttagttttttatttgttgttagaatggagcgttaatagtgttttttatagtgatatgtaatttttaattttagagatgatgaagtatattaatgataaaggagaaatgttttagtagttttttgttagtatattattttttgaaaaagttgttttttttatattttgtaagagatgggttttaatttagagtttaaggtaaatgattttttttaaggagaaggaataaatagttttagaaattatgaaagtttgtttttaggagtgtttttgaattttagtaggggttatatttattttgtagaaataggtgaggtatgtttttggtataaaattttaatggtatagaaggataaattgaaaaataagtttttttttaaatttttgatttcgagttatttagtttttttttttagaggtaaagttgttattagatttttgtatttttttaatatatatttttagaagagttgttaagtgaatatatgtttaagtgaaaatttattttagaagtgtatttttttaaggaattttagggttggaaggaatttgtgttagtttttaatttataatttttattagtatttattgtttttgtataaaaattttttttaaaaaagttttttttattttgatatagtttattttatttttatttagttttaataatttataaaatatatttttgaaagtttaaaatttgttattatgttttttttttttaattaatttttattttgatttttaagttagagaaaataggtggttaaatgttttttgtttaagatggaatttagaatatttgaagattttagatttttattttgttaaataacgtgttttttttttttttttatagagtatttggttttaggaaatttagagttatattttttatagataagattaaatttttatttaatatatttagaaattttttttaagaggataattatttattagaggaaaaaagttttttatgtatagttggtaaagggatggaattatttgtgttattaaaattgatagacgtttatgagatttattaagggaaatattagagttttagtatatatttgttaatatagtatatatgaaggttttatttataatttttttggttaagtagaaattttggtattatttattttaataaatttttaagatattatgaaatagaattttaggttttgatattattatttgttttaggttttgaagcgttgttggataagaggggtaaaatacggttttgttttggatttaaagttggttttttatattagtaagtatattttggtattttggttatttttttcggttatagtattatattgttataaaaggtagatataagtattaattagtttataggttattagataagtttagtttgattaatgtttaatatagtaattgggttattattgttatttttgtggtggtggtatatatatttagtttttgttcgggttatggtttaggattattttttatagaggttgtgagttagagttttaattgtgtagggttttaattatgttaggttatttattttttttaagaggattttattagtgtttgttcggttatatagttttttatttattaagtaatatagttattagtatattttaggtattagttaaggattataaaattaacgtgaatgttagtttttgtattaaaagtttaaaggagaaatttaaattttatatagatgttttatgaagatgtttagtaaatttatttttttttgttttttggaatttattttagtattgtgttatgtgtgtgtttagtaattttttataaaaagttttgttttttgtgatgttattagattatattgaagaatatataagtcgtattatgaaggttgttgttttatatagttttaacgtagtgagaattgatgtttttatatgttgtttttttgggtatttaaagaaatttttgtatagttttataaattagttgtagtttaaattgatttgtgttgtgatttgtatatataggttatatttttttgatagaaaatatagtttaaaattaaatttgtagtttttgttaagtgaatgtataggattttattgtatttaggttttttattgtaagatttatttttgtttttattttatgttttattgttgtgttttttatttgtttttttttagttttgttttttgtgtttttacggattgtttttagtttaggtgtgtaggaagtatatatatgtttgtagagtttttatggtttttgtatttagggtatgattttaacgtatagtggttgtattgatttgttaaaataaaggaatagattattttttttaatttatagggaagttttaggttgtgcgggtagtgagtagatttgtgtttgtttgcgtttgttttggtgaaaaattttatcgtttaggttgtagggtgcgagatttaggtataaatattttgttggatgaggaggaaagatgtaaggttgtttttttttagagatagtaaagggtaggtttgtagttttatttattttaggattgtgatttttgatagagtcgagagattagggttgttgaattaggtttgaaggttttagtgaatttcgtgaagagaggaggggtttggttgtaatatggatttagaggatatttttattgtaggagaaggaatagtggggatggggtggatttgttaaaggaatatagtttaagtttttgtagtttaaaaaagtttagttttttttggttaaagttttcgcgagtttttttggtattttttttgcgggagttataggggtagtgggatatttagtttttttaaaagtatttttacggttgtttgtgttaagtttttattttaagagttttatttttgcgaagtaatgtgttttatatattggttttaaagtatttatggttggttgtaataaatattaaggaggtttgtttttgtattcggagttgggtgtttttattttagatgatttcgagggtgtttgataagatttgaaggattttcggattttagagtattatttcggacgtttggtatttttgtcgcgcgggtacggcgatttttttagttgttaggttagtttttgattttcgagagggtttcgtagtgttgtaggggaggtggggattcgaataaaggagtagttttttcgtcggtgttattattcgacgttggttttaaggttcggttagtttgtttaaagttggtataagtttgttttgtaaaataaaagaagggaaagggggaaggggattttggtatagatttggttcgatttggatataggttgggtttgtaagttcgcggggatcgggtttagaggggtagtgttgggaacgtttttttcggaaattaattttttagggtattcgttttttttttatgcgtcgttttattttcgtcggagattaggtttcgcgggggttatcgttgtttatcgttttcggcggtcgttggttttgggttttcgttgttggtttttttttttttttttcgtatttttttttttttttgtttttttcgatttttttttcgtcgtttggtttttttttttttcgttttgttttttcgcgtttcggttcgcgcgagttagacgttcgggtagttttcggcgtagcgcggtcgtagtagttttcgtttttcgtacggtgtgagcgttcgacgcggtcgaggcggtcggagtttcgagttagtttcggcggtcgtcgtcgtttagatcggacgataggttatttcgtcggcgttcgttcgagttttcgtttcgtcgttaacgttataattatcgcgtacggttttttgatttcgtttagtattgatcgggagagtcggagcgagtttttcggggagtagcgatgcgatttttcgggacggtcggggtagcgtttttggcgttgttggttgcgttttgttcggcgagtcgggttttggaggaaaagaaaggtaagggcgtgtttcgtcggttttcgcgtcgttttcggatcgcgtttcggatttcgtagttcgtttaatcgcgtatcggcgtatcggttcggcgttcgcgttttcgttcgtttttttttgtttttttgagattagttgcgtcgtcgatcgggatcgcgggaggaacgggacgtttcgtttttcggtcgggagagtttggggcgggcggaggaggagacgcgtgggatatcgggttgtaggttaggcggggaacggtcgtcgggattttcggcgtttcgaatcgtttttaattttttttttttatttttttcgtttagttgcgtaggatcggcgttagtgggcgaaagtcgggtgttggtgggcgtttggggtcggggtttcgtacgtgcgtttcgcgttgtttttttagggcgcgacggggttttggcgcgtattcgaggggcgggcgttgtttattcgtcgagattgtattgtttagggaagttgaggaaggaatttaaaaatatagttttttttcggatttcgcgggataggcggttttttgagaggattttttcgttttcgtttttcgcgtaggttttaaattgaagtcggcgttcgttagtttggtttcggtttttttttaggttttcgcgattttcgttttttagtgtggagtcgtagtttcgatttgggagttgggagaattcgtttattattatttgcggttttcggggaggggtggtgttggcggcggttagttttttcgttggtaaaaggtaggtggggttcgattcgttttttgggcgtagatttcggtcgttcgtttcgttcggtgcgttttcgttttgtttatttaagagtgttttttatttttcggggattttagtttttttttgggcgttcgcgtcgaaagttttaggttttttttcgatggtcgtttcgcggagacgttcgggtttgttttatttgtagtttttcggtcgcgtttgggtttcgcggtggagcgggacgcggttgt

SEQ ID NO: 36 - DNA, 6274 bp, Artificial Sequence
  chemically treated genomic DNA (Homo sapiens)
atagtcgcgtttcgttttatcgcgaagtttaggcgcgatcgaagggttgtaggtggagtagattcggacgttttcgcgaggcggttatcgaaggagagtttggggttttcggcgcgggcgtttaggagggagttggggttttcgggaggtggggggtatttttggataggtaagacgagggcgtatcgggcgaggcgagcggtcggggtttgcgtttaaggggcgggtcggattttatttgttttttgttaacgaggaaattaatcgtcgttagtattattttttttcgggagtcgtaggtggtggtagacgagtttttttagtttttaggtcgaggttgcgattttatattggggaacgaggatcgcggggatttggagaggggtcggggttaggttggcgggcgtcggttttagtttgagatttgcgcggagggcggaggcggggaggtttttttagaaagtcgtttgtttcgcggggttcgaggggaggttgtatttttgggttttttttttagtttttttaaatagtgtagtttcggcgggtgggtagcgttcgtttttcgggtgcgcgttaggatttcgtcgcgttttgggaagatagcgcggggcgtacgtgcgggatttcggttttaggcgtttattagtattcggttttcgtttattgacgtcgattttgcgtagttgggcggggaaagtgagggaagaaagttgggagcggttcggggcgtcggaggtttcggcggtcgtttttcgtttggtttgtagttcggtgttttacgcgttttttttttcgttcgttttagattttttcggtcgaagaacgaaacgtttcgtttttttcgcggtttcggtcggcggcgtagttgattttaaggaaataggaaaggacgggcgggggcgcgggcgtcgagtcggtgcgtcggtgcgcggttgggcgggttgcggggttcggggcgcgattcgggggcggcgcgggagtcggcgagatacgtttttatttttttttttttttagagttcgattcgtcgggtagagcgtagttagtagcgttaggagcgttgtttcggtcgtttcggagggtcgtatcgttgtttttcgaagagttcgtttcggttttttcgattaatattggacggagttagggggtcgtgcgcggtggttgtggcgttggcggcgaggcggggattcgggcggacgtcgacgaggtggtttgtcgttcggtttgggcggcggcggtcgtcggggttagttcgggatttcggtcgtttcggtcgcgtcgggcgtttatatcgtgcggggggcggaggttgttgcggtcgcgttgcgtcgggggttgttcggacgtttagttcgcgcgggtcgaggcgcggggaggtagggcgggaggaggagggattaggcggcggaggagggatcgggaggagtagaggaggaggagaatgcgaggaggagggaggagaattagtagcggggatttaaggttagcggtcgtcggaggcggtggatagcggtggttttcgcgggatttagttttcggcgggagtggggcggcgtatgggaggggagcgggtgttttgaggagttaattttcgagaggggcgtttttagtattgtttttttggattcggttttcgcggatttgtaggtttagtttatgtttaggtcgagttaaatttgtgttagggtttttttttttttttttttttttttgttttataaagtaaatttgtattagttttagatagattggtcgagttttagagttagcgtcggataatggtatcgacggggaaattgtttttttattcgggtttttattttttttgtagtattacgggattttttcggggattagaggttggtttggtagttgaggaggtcgtcgtgttcgcgcggtaggggtgttaggcgttcgaggtggtgttttaaagttcgagggttttttagattttgttaagtattttcgaaattatttgaaatgagggtatttaatttcgggtgtagagataggtttttttaatgtttattgtaattagttatgggtattttgaagttaatgtgtgaagtatattatttcgtaaaagtgaagtttttggaataaaggtttgatataaatagtcgtggaggtgtttttagagaggttaagtgttttattgtttttgtagttttcgtaggagaaatgttagggaaattcgcggaagttttggttaaaagaaattgagtttttttgggttgtaggaatttgagttatatttttttggtaagtttattttatttttattgtttttttttttgtagtaaaaatgttttttaggtttatgttatagttagattttttttttttttacgagatttattaggatttttaggtttggtttaataattttgatttttcggttttgttaaaaattataattttgaagtaagtgaagttatagatttgttttttgttgtttttgaaggggagtaattttatattttttttttttatttagtaaaatgtttgtgtttgggtttcgtattttgtagtttgaacggtggggttttttattagggtaagcgtagatagatataggtttgtttattgttcgtataatttggaatttttttgtgaattaggagaagtaatttgtttttttgttttaataaattagtatagttattgtgcgttgaagttatgttttgaatgtagaggttatgaaggttttgtaggtatgtgtgtgttttttgtatatttgggttgagagtagttcgtagaaatatagaaaataaaattagagaaaggtaaatgggaagtataatagtggaatataaaatgaagataggagtgagttttataataaaagatttgaatataataaagttttgtgtatttatttaataagggttgtaaatttggttttaaattatattttttgttaagggaatgtgatttgtgtgtataagttataatataaattaatttaagttataattgatttgtaagattgtataggaatttttttgagtgtttaaaaagatagtatgtaagaatattagtttttattacgttaggattatatgagataatagtttttatagtacggtttgtatattttttaatgtgatttgatagtattataagaaatagagttttttgtaaagaattattagatatatatatagtataatattgggatggattttagggaatagagaagaatgggtttgttgaatatttttatgggatatttatgtaaagtttgagttttttttttgagtttttgatataaaagttgatatttacgttgattttgtagtttttggttagtatttggagtgtgttgataattgtgttatttggtaagtaaaaaattgtatggtcgagtaggtattaatgaagtttttttaagagagataagtagtttggtatagttagggttttgtatagttagggttttagtttatagtttttgtggagggtggttttagattatggttcggatagaggttgggtgtgtgtgttattattataggaatgataatagtggtttagttgttgtgttaagtattggttagattaagtttatttgataatttgtgagttggttaatatttgtatttgttttttatagtaatgtgatgttgtggtcgggagaagtgattaggatattaaggtatatttgttagtatgagaggttaattttgaatttaaggtagagtcgtgttttattttttttgtttagtaacgttttaaaatttgagataaatggtgatgttaggatttaaaattttattttataatgttttggaaatttgttagggtgagtaatattaaaatttttgtttggttaaaaaaattatagataaagtttttatgtatgttatattagtaagtatgtattaagattttagtattttttttaataaattttataagcgtttgttaattttaataatatagatggttttatttttttgttagttgtatatgagaaattttttttttttgatgagtggttatttttttagaagaagtttttgagtatgttgaataagagtttagttttgtttataaggaatgtggttttgaattttttaaaattaaatgttttgtgaaaggggaggagaaatacgttatttggtagggtgaagatttgaggtttttaaatattttaagttttattttaggtaaaaggtatttgattatttgttttttttggtttagaggttaaagtaaagattgattaggaaaaaaaaatatagtggtagattttagatttttaaaaatatgttttataagttattggagttaagtaaaagtagaataagttatgttagagtggaaagggtttttttgagaaagatttttgtgtaagaataataagtattaatggaggttgtgaattaaggattgatataggttttttttaattttaaagttttttaagaaaatgtatttttaaaataggtttttatttaaatatgtgtttatttgatagtttttttaaggatatatgttaaggagatataagaatttggtaatagttttgtttttagggaggagaattaggtagttcggggttaggggtttagagggagatttgttttttaatttgtttttttgtattattgggattttgtattaggagtatgttttatttatttttgtaaggtaagtgtggtttttgttgaggtttagggatatttttgggggtaggtttttatggtttttgagattgtttattttttttttttgaaggaagttatttgttttgagttttgagttgagatttattttttgtagaatgtggaagaagtagtttttttaaggggtaatgtgttgatagaaaattgttgaagtattttttttttgttattagtatgttttattatttttagagttgagggttatatgttattataggaggtattattggcgttttattttagtaataagtagaaagttgagtaaatcgaaaaattaatatttttttttagtttttttagagaattgaggttattgggtaaattattgttttttaaattggagagataggtaaatatagaagtataatttttagaggaagaaattagtagatagaaatttttaaggatttagtgtcggttgggaaagtttgttttgtaattgagaaattgcgggaggtttagtgtgggtagttttgtaaattaagaattttagtagagtttagttatggtgtagggtagtatgagatatttgagagtgttattttttggagttttgttaggtttttattacgaatattagggggaaaattttattatgtttttggtagtggaaggagaagaggaattattttgaaataggttggaatattttattattaatagaaggtttgtttttaggagaaattattttattagaggtttaatttggtgttttattagagggtgatttatttagagtaagggaaatatataattttatttttttttaatagttttgtattatttaaggggttggggaagttgagaagtaagtatgaagtttatagtttagggatataggtttattggaagattgtgatatgcggtaggattgtgtaatattttttttttttatagtttgttattacgttattagaagtttttttattatagttttttttatttagtatattatttttatattgtaaggtatattaaaaggtaaagacgtagtttgaagagattgtataagtattagaattagaatgagatatgatacgaacgttataattaattgttgtggtttgaatgtgttttcgaaaagtttatatattggaaatttaattcgttgtttttatgaatgaatttatatggtttttatggcggtgggttaatttttgtgggagtggttatgttataagagtaagttttttttatacgtgatgtttttttttatgttatgatgaagtaagaagatatttattagatgttagtattaagtttttggattttttagtttttaaattagtttaaattagttttttttgtttataaattatttagtttgtggtattttgttataattatagtaattggattaagatattattatatcggagtattaattataaaaaaattatgattaataggttaggagttttaatggaaaaaataggtaatatgtaagattagatggataatgtaagtagagttatggaattttttttttttttgagatagggtttggttttgttgtttaatttagagtgtagtggcgtgattttggtttattgtaattttaattttttaggtttaggtgattt

SEQ ID NO: 37 - DNA, 3720 bp, Artificial Sequence
  chemically treated genomic DNA (Homo sapiens)
tgtagttgtttattaaaattttatatatattttggtatataattatattcgttggaatttattttatagatatatttatatttatatagttaaggatgttgattttaataatattggtataagtaaaaagttggaaattgtttatatgtttatggataggggataaatcgattaatttaaggtttttttttataatggagtattatatagttttgaaaaagaatgataagatttttatgttaggatatggtataatttttaagttattttaagtgaaaaaataataataataataatattgtagaataatgtgtatggttggatatatataaatttttttgaaagaatatttaagaaatttaaatgtggttattttaggagttaggaatgaggtaggtggagaggagggatttttattttttaatttagaatatattttgttgtgttagttgattttttttttattgttaataagtattatagttttttttaatttaaattattttttttagtataaatttaaaaaaaaaaaatttaaaatggaaaaatatataggcgtgagtaaaagaaatgaatggtaataatttttgtggtttattgagtgcgtttggatatttatgtgtttttagtttttttttataggaaatgtataggtgagaaattgacgttaagggggattgagtgttaagttagttagtggtagagggtagatttaaatttaatacggtttttttttgttgtttttcggtttttgtttttaggtgggaagcgtatttatcggacggtcggttcggtgaggcgtagcgttttagattggcgtattcgcggttttagcgttttacgtttggggagcgcgcgcgtacgtagcggcgcgagtttggcggcggcggcgataataataacgttatagttcgagttttttttttcggagttttcggtatatattttgtgtttatgtttgggtatttacgttacggcggtagggtcggggttttttaaaatggtagtggttcggggagtcggaagttcggagttagcgtcgtcgtagttatataagtgggggggttgtgggttgggggagttcggtagcgttttggagaggcgaggagtcgtcgttcgaggtcggtgcgggcgagcgagggcgtcgcggtttttcgattttttttttagaggtgagtgttcgaagttaggagttcggcgtttataggtttgtgcgttgcggggaatttttatcgttagttttttcgttattcgcgcgtttttaagtttagcgggcgaggtttcgggcgttttatagtcggcgtcgcgttatgttttattttagcgagtttttcgaattcgacgcgtttttcgttaagtttattgaaggttgttgcgtcgaatttagcgttgaattgtttcggttgtttgttagggacgttttcgcggttatcggttattttggaggtaaggagggcgagtaggggtgtttagacgacgacggcgtagcgcgggggcgtattatatttgagaattaggagggattgggatattggagttatgagaataggggcgatgggaagtttaggagttttggggtgcgtatttttatttttatttatattgggtcgttagcgttttcgtaggaatttgtgcggttatcggagcgtttttttgtttgtgtacgtgtgttttgcgtgtgtatgtttttatgtgttttttgggacgtatgcgggtttttgttgaattagaatgtgtaaaaggtattttgtgtatattcgtgggtattaagagttttgtaggtaggggttgtggatttaggtgtattttttgatgtgtttagagttgatttttgttttttttttagtaggcgattttttgagttgggttttgaatagttgcggcgtaagtggggatttagtcgatttttgttttttggaggggtttgcgtttatattttttttcggttttagttatagcggtagtttttttatttaggtagtgttcgaatattcgtacgattcggaggtattttttaattttatgtcgggcgttttaggtttggtattttttttcggtttagaggtagtagcgtttagattttcgttggatgtttttttttttgcggggttcgatgttttgttgtcgggttcgtcggatttttatttttcggatttgggcgttgttttttttttagaggcgttttgggaggtttcgttttgcgcgggtgttttttcgtagtgtttgtatgagttttagtttttttcgttcgacgttaagttcggttttcggcggtttttcgtttcgttagcgttggacgttgtttttgtttttaagggtttttacgcgttttgggagttgttttttgtgggggttttagggaattgtgggttatagggagattattaggtcgtttcggaggttcgttttttcgtaatagggattaagattgaggatttgttgtttattagttgttttgcggaattgtcggtcgttttagttaatagattttattttagcggggtttatgacgttttttcgttggtttcgggtgatttaggggagggggttgagggtttttttgggtttttgattttttttagtggggagggagggagtagcggcgacggcggagagtttttggttagtacgtagttttagtttttttcgttgggttttcgtagcgtcgtcgcggcggatttttttaaatttttggtggcggatatttttggaagtagtggcgtggttgtattattcgtgtcgtcgtcgtcgtttattttttttttttaggttaaggcgcgacgtaaggggcgtcgcggcggtaaatgtagtacgcgttgtttttgttcgcggtcgtacgttaaggttttcgtttgttcggtggagagttgtgtgcggagttttgcgcgtttcgacgagtttaatcgttatttgcgtatttatacgggttataaatttttttagtgtcgtatttgttttcgtaattttagtcgtagcgattattttattagttacgtgcgtatttatatcggcgagaagttttttgtttgcgacgtgtgcggtcgtcgtttcgcgcgtagcgatgagaagaaacggtatagtaaggtgtattttaagtagaaggcgcgcgtcgaggagcggtttaagggtttcggtttttattcgttgggtttttttttcgtttttttttgagtaagagatgggtttatgggttggggcgtcgtcgttcggcgcgtacgagtttcgggtcgttttttttttcgttttttttttaattttttttcgtacgttcgagggtcggttttcgtttcgtttttagtttttttgaagcgttcgtcgtatacgttttatttagtattagttcgtcggatagttttcgcggtttaggcgttgttatttttgttagtcgcgttttgggggaagttttttgagattatttagtgaataggtattattttgggatttaagatagttttttgtaattgtatacgttttacgtttttttttataatttttagagataggttggggtaggttaaggcggtttcgcgcgggattttgtatagtagtgttttatttagtagtcgattggatgtaacgttttgttttgggttttttttttttttgttgttgttaatttttgtaaagtagacgttatttttaagtagttgataaaattgtttatttttgtaattaaaattattgtgttaaaagtttattgaatttgttatgtaagttttt

SEQ ID NO: 38 - DNA, 3720 bp, Artificial Sequence
  chemically treated genomic DNA (Homo sapiens)
aggagtttatatggtagatttagtaagtttttagtataataattttaattgtaaaaataaatagttttgttaattgtttgagagtagcgtttgttttataaaaattaataataataaaaggaaaaaaaatttaaagtaaaacgttatatttaatcggttgttggataagatattgttgtataaagtttcgcgcgagatcgttttggtttgttttagtttgtttttgggggttatagaggaaggcgtggggcgtgtgtagttataaaagattgttttgaattttagggtagtgtttatttattgggtggttttagaagattttttttaaagcgcggttgataagggtgatagcgtttggatcgcgggaattgttcggcgagttggtgttgaatagggcgtgtgcggcgggcgttttaaggaaattggaagcgggacggaggtcggttttcgggcgtgcgaggaggagttggaagaagagcggggaggggaacggttcggaattcgtgcgcgtcgaacggcggcgttttaatttataaatttattttttgtttagagagaagcgaaggagaggtttagcgagtaaaagtcgaggtttttgagtcgtttttcggcgcgcgttttttgtttgaggtgtattttgttgtgtcgtttttttttatcgttgcgcgcgaagcggcggtcgtatacgtcgtaagtaaaaggtttttcgtcggtgtgggtgcgtacgtggttggtgaggtggtcgttgcggttgaagttgcggaggtagatgcggtattggaagggtttgtggttcgtgtggatgcgtaggtggcgattgagttcgtcggagcgcgtaaagtttcgtatataattttttatcgggtaagcgaaggttttggcgtgcggtcgcgggtagaagtagcgcgtgttgtatttgtcgtcgcggcgttttttgcgtcgcgttttggtttgggggaaaggggtgggcggcggcggcggtacgggtggtgtagttacgttattgtttttagggatgttcgttattagaggtttagggaagttcgtcgcggcggcgttgcgaaggtttagcggggaaagttgaggttgcgtattggttagaaatttttcgtcgtcgtcgttattttttttttttttattaggaggggttaggagtttagggaggtttttagtttttttttttaagttattcggggttagcgggaaagcgttataggtttcgttgggatagagtttgttggttgggacggtcggtagtttcgtagggtagttgatggatagtaagtttttaattttggtttttattacgggaaaacgagttttcggggcggtttggtagtttttttgtgatttatagttttttggggtttttatagaaagtagtttttagggcgcgtagggatttttgaaggtagagatagcgtttagcgttggcgaggcgggaggtcgtcggaggtcgggtttgacgtcgggcggggagagttgaggtttatataggtattgcgagggggtattcgcgtaaggcgaggttttttagaacgtttttgggaaaggggtagcgtttagattcggggagtaaaggttcggcggattcggtagtaaggtatcggatttcgtaggaaaaggggtatttagcggggatttggacgttgttgtttttggatcggggaagggtgttaggtttaagacgttcgatatgaggttgaagagtgttttcgggtcgtgcgggtgttcgggtattgtttgaatgaagaagttatcgttgtagttgaggtcgggagggggtgtgggcgtaggtttttttaggaagtaggagtcggttaagtttttatttgcgtcgtagttgtttaaagtttagtttaagaagtcgtttgttgaggagggagtaggaattagttttgggtatattaaagggtgtatttgagtttatagtttttatttataaaatttttggtgtttacggatatatataaagtgttttttgtatattttgatttagtaggggttcgtatacgttttaaggagtatatagaaatatgtatacgtaaaatatacgtgtataggtaaaagggcgtttcgataatcgtataggtttttgcggaggcgttggcggtttagtgtgggtgggaatgggggtgcgtattttaggatttttaagttttttatcgtttttatttttatagttttaatgttttagttttttttggtttttaggtatggtgcgttttcgcgttgcgtcgtcgtcgtttgagtatttttgttcgttttttttatttttagggtagtcggtggtcgcgggagcgtttttggtaggtagtcggggtaatttagcgttgggttcggcgtaatagtttttagtggatttgacgaggagcgcgtcgggttcggaaaattcgttaaggtggagtatggcgcggcgtcggttgtggggcgttcggggtttcgttcgttgggtttgggggcgcgcgggtggcggggaggttggcggtaggggtttttcgtagcgtatagatttatgggcgtcgggtttttggtttcgggtatttatttttgggaaaggagtcggggagtcgcggcgttttcgttcgttcgtatcggtttcgggcggcggtttttcgtttttttaaagcgttgtcgggtttttttagtttatagtttttttatttatatagttgcggcggcgttggtttcgggttttcgatttttcgggttattgttattttgggaggtttcggttttgtcgtcgtgacgtaaatgtttaaatatggatataggatgtgtgtcggggatttcgaaaaggaaagttcgagttgtgacgttgttgttgtcgtcgtcgtcgttaggttcgcgtcgttgcgtgcgcgcgcgttttttaggcgtggagcgttggggtcgcggatgcgttagtttggggcgttgcgttttatcgggtcgatcgttcggtagatgcgttttttatttggaggtagaggtcgaggggtagtaggggaggatcgtgttgggtttgaatttgttttttgttattaattagtttgatatttagttttttttaacgttagttttttatttgtgtattttttgtggagagaaattgagagtatataaatgtttaggcgtatttagtaaattatagagattattgttatttattttttttgtttacgtttgtgtgtttttttattttaagttttttttttttaaatttgtgttaggaaaaataatttaaattaaaaaggattgtaatatttgttaatagtaggaggaaagttaattagtataatagggtatattttaaattgaaaagtaaaagttttttttttttatttattttatttttagtttttgaggtagttatatttaagttttttgggtatttttttagaagaatttatgtatatttaattatatatattgttttgtaatattattattattattatttttttatttgaaataatttagagattgtgttatgttttgatataaagattttgttatttttttttaaggttgtatagtattttattgtaagggaggattttgagttagtcgatttattttttatttatgagtatgtaggtagtttttaattttttatttatattaatgttgttggagttaatatttttgattatataaatgtgaatgtgtttgtgagataaattttaacgagtgtaattgtgtgttaaagtatatgtaaaattttgatagataattgta

SEQ ID NO: 39 - DNA, 14147 bp, Artificial Sequence
  chemically treated genomic DNA (Homo sapiens)
gggggtattgagtaatatatttagattaataatattttataagtgtgagtattattgatttaaatttttttgttggttgtgttttgtgtttatgtttgttttatatttattttttttagagttgttttttttagagttttagtaatttttatttttttaaatttttttagttatgggaaggattagtaggtgttagtggatttaaaagaattttagatttgttgagatttttgatttttggtgtttagattaattagtaaatagtttaattaaacggtttgtttttatggttaatataattttgaattggtggttatttagattaagtttattttgtttttgagacggaattttgtttttgtcgtttaggttggagtgtagtggtgcgattttggtttattgtaatttttgttttttgggtttaagggatttttttgttttagttttttaagtagttgggattataggtatttattattattttcgattaatttttgtatttttagtagagatagggttttgttatgttggttaggttggttttaaatttcgattttagatgatttgtttattttagtttttttaagtgttgggattgtaggtgtgagttatcgcgtttagttaaagtttagtttgtataagaaggttttttttgttatgttataggatttttgagtttattaaatagattttaatgttttgagattttacgtatttttttaaaatgaagtatttaaattgttagtgtttgtttttttgtttggtttttttgatgtattgatttggtttgttagtgtgatgaaaaatatggttgagttttattgttttattgtaattagtaggattgtttagaagtttaatttttttaagagatgaagatttgagtttatgtagttggttgttttttaaaaatatttggttatttgggatatattttgaattaattttttggttattttatgtgattaaaagtgttagttttttttgtttttagtatatttttttgtttgggaagtggaagggatgaaatttttatatttttttttgatgatatagaaaggagtatatatttatattttatgaatagatatgtaattatagaagaaatagtttaacggtcgggcgcggtggtttatatttgtaattttagtattttgggaggtcgaggtgggtggattacgaggttaggagtttaagattagtttgtttaagatagtgaaatttcgtttttattaaaaatataaaaaattagtcgggaacggtggtaggcgtttgtaattttagttatttaggaggttgaggtaggagaatcgtttgaattcggagggtggaggttgtagtgagtcgagattacgttattgtattttagtttgggcgatatagtgagattttattttaaaaaaaaaaaaaaaagtataattatatgattatttatattgttttatatattaaattagtagtaatttgttttttatatagtaaataaaaataaattagtagtaataaatatattttttttgtgttatagttagtatttggtgaattttgtattttttttttttttaaagtgttgaatttataggtttttataaggtaagtttatattattaattaattttgtttttttttttgatgttaaaattgttttttaggagttgattaggtttatttttttgttttttaagtattatttttagaatatttttgaaagtatttttgttttttggtaataatatttatattttatttattttttgtttttaaatatatatttagttaattttaggttttttttaatggagtagttatttatttatttaatatacgttgggtgttttttttgtgttatatattgttttggtttttggggatagagtaggaaataaaaaaaaataaaatttgtttttatatagttgatattttagttaggggagataaataataaataaatgaatgatgtagtatgttagatgttgatagtgttatggagaaagtatattatggagattagaagtattatttgtaatggaatagttatgattttaagaagaatggttgattggatgtgaagtgtgagagagaggagtttaggtttttggttgagtaattggagggatggagttgttattatttgagatggagaagttaggggaggagtagatttggaggggaaggttaggaatttagtttggaatttgttaagtatgaggtatttattaaatattgaagtggatttttagaagatgttattaaaattagttaagtttaggagagagttttgggttagaaataaaaatgtgggagatattggtatatatatgggtttatattatttttttttttaatttaatattttattttattgttttttgtttttttaatagtatttagttttatttattttttaaattgatttttatattgatagtataataaaatttatattttttattatattaagattttgtgtgatttaatttttttttattttttggattttgttttaggttattttttttttttatttaatttttaatattttgattttattgttttttaaatagttttttgttgttttttgttttttttgtggaaaaggtttttttattgtttaattattaggtatttttcgatttttttttattttttatttttgagaaaggttttttttgattttttatattaattaggatttttttgggcgagatttgatttaaattggtttagagaaaaggagttaattgattggtttatgtaatttaattttttttttttgttgtaatttttttttggtttttattttatttaaggttaaagttagggtttttattatggttttgtaggttttatatagtttgttttttttattatttttttgattttattttttatattttttttttatttatttttttttagttagagtggtttttttgttgtattttaaatatgttaggtatatttttattttagtgtttttgtgtttgttgttttttgtgtgtggaatatattttttatatagttatattatttaaaatttattgtttttaagtttttatttaaatgttttttcgtgaagttatttttgagttttttttaaaattgtagttttttatttttgtattttttattgttttttatttttaatttttgttattgtagttagaattatttgatatatagtttttattttattggttttttgttatgtttttttttataagaatttgaagtttattaggtcgggagttttgtttgttgtgtttgttgttattttttagtgtttaaaattgtttggtatatagtaggtatttaataatttttgaattagtgaaaattagatggtggtttggtatttttatataggaatgagttaggtggaaattatttaggatataagtagattttgaagtgataaggaagggttattataattatgtggggtttattttgtttttttttgttttttttttttaggtttagtaatagttttattaaggattttatgaatattaaagtttatatttatatgttgttagaggtgagagtagtttattttattattagattttgtgtttagggtggtgatttgaagaaggaagagagcgaaagaagggaaggattatttttttttttaaattggagttaagggagggaggttagagtaagtttgggggcgtaatttagatttagtttttgtttaattttttttgtttttttttttaggggtttagagaattataaggtttgtagaattttttagagaagttttattattgattttttttttttatttttagatattaaagagtttgaatgtttttgagttatatggtttttttttttttttataaattttgttagttgttacgggggtttgtttttagggtataaagttattgagagatttagagatttagtttttttgtggaatttttaaaatgttttagtagttttgtttttagtttgttgtttggtagtatttgttagttgattttatgtattgtttttttttttgttattttggtaatttgggttttttattttatttttttttttatttttttttttagacgttattttttgaattgttatagagaatgggttaatttatggtggaggtttgtttatttttataataattaaagggttttaaggtttacgtttttatatatttaattattttttaggtattttaaattatatttaaattttaatttagttttattttgttttagtttttgtttgtaagtgttttagtttttaatgggtatagatttggatttcgttttttttagtcgggtttttattttaggttgagtttagttatcgttaattaatgtagagttaggttttttttttttttaattttggtcgtagtttaattttgttttttgaaagtatttcgtttttgttatttaatgttttttcgtgtgtttgatagttattttgtttttttattttcgttgtgttttaaattcgtttttatttagttttatggttttgtttaatcgtagagttgttttgttcgtttacgcggagtttagttcgatttattttcgtcggttgttacgtttatttttatataagttttgttttcgttgagtagtatggcgtgcgatatcgtttttttggtgttttggtaggggtttagaagtttttcgttcgttaattagagaaaaatagggttatttattttcgtttttgggggttgttttttattaattttatgtaagttaattagtgtgaggtagattttcgttttttcgatataggtttcgagtttttttagttgtttatagttcgttagtttttgagttaatcggcgtggagtatcgtgaaggtcgaacgcgttttttcgggattttaggggtcgtgagcgttttattatttttttttacgttaattacggtatagttttgtagggaagggttcgttttttaatttttcgaggttttgcggtcgattaatagcgttttggttaattagcgagcggcgggatattgggtttttttttttcgggtttacgtgagttgtagggaaacgtaggggcggtttttaggtgttgtcgtcgttatcgttattattatttttatcgtcgtttcggaatttaggtttggggggcggtggggtcgcgtatggagttttcgtttttcggagttgttaatattgttaacgttatcgttacgttatatataggtgagttttgggtttggagggtggagggtttagttcgtgattttacgtatttttttcgttttcgcgtagaggatgtggtttggtcggtggtttgttggtgttcgatttttcgtcgttattattacggttggtggatttgcgtgtggtattgtttaagtttttcgttttttatagtggatttgatcgtggtttaatttttttttttcgttgtataatggatcggtttgcgtgtttatgtttttttttacgttaatttagggtggattcgtttataggttttttttttatttttatttttattcgttttttatttatttttatttatagggagttagtttgtgatagtgtttagtttttttaatagtaggtgtatttgagtgtttggattttttttagttttaatttttaggagattcgttcgtggttttatttattttattttttttgtatatcgtagcgaattaattcgtggcgtcgtattttttcgtatttttttttaatagtgagtttatttgagtttgtatttttgttttttttagttttttaatgtattagtttatggttttttttaaaattattttttttttttattattattattattattttatagtggattagtttttatgtttggatttacgtttttttagttattagtttattgttttgttttttttttttcgtagattgtcgttttagcgtttggggtttttttttttttaatagtgggttagtttagtgttttatatttttttatttttagtagtttagtttatagttttttttttttttgttttgaattagtttgtgtgatggtttttttttttttttattgtggtgtaggagtttgtaaggttttttgttttttttttttttagacgatgagttttattatttttttttttgtagtggatttgtttattggttttttttttttatatttttgtatgtttgtatagtttttcgtatattttttcgtgagtttagtgttttgtaattgggggaagatcggtcgtgtatttttaatttttttttttttttttttttttttttagaagagaacgtgttgatttttttttttttgtgatggagtattgtacggttttttttgttttttattttttaatagtgggttagtttggttatattcgtaattataaagacgttttgttttattataataagtgaatatattagcgttagtgatgatagtaatgttaataggagttagcgtttattgagtatttgtcgtatattaggtagagtgttttatatgaatgagtttttttaatttttattataattttatgagataggtagtgagggaattgggttatagggaggttaaattttttatttaaaggtggtttaggaagtatttaggatataggataatttttgaggttttttttttagattttattttattttacgtgaggttttagtttttaaaaattaaattagtttttatttttaagtttttgtttttgttgttttttttgtttgtagagtagtttttattttttatttttttttagtatttatttattttttaattttagtagttgtgtgattttagatgagtgatttaattattttttttttgtgtttttttttttatttgtgaaatgggggattagaattagaattttttttagtgtaaataaatattaattgtgaattaatggtaaaataagtaatttttttagtattatcgtttatatttttttatttttttattgtgttttaattatattggttttattatatagttttttaaatatagtaggtatgggttagttttagggtttttgtattggttgttttttgtgttttgaatattatttttagatttttgtatggttttttttagtattttgtttaaatattaatttttaaaggatgtttattatattgtggtgtgtggaatgtagtataaaaagatatatgtatgaaagatgtttttaagaatgttagtttatatatgagtaagggttttttttttttttaaaaggatgtgtttataagattgaggtacgtaatatgttttgtaaaggtataggtataaaagttgtttttaagagtgttagttgtatatgtgaataaggattgtgttgttgtattgaaagaatgtgtttataaaattgtggtgtgtagttgggtataggggtgtgtatttatagttttagttattcgggaggttgaggtgggaggatagtttgagtttaggagttttaggttagtttgggtaatatagcgagatttttttttttgaaaaaaaaaaatttaaaaaataattattgtggtgtgtgtaatatatttttttaaaggtataggcgtaaaagatgtttttaagagtgatttgattttgttgtatttgggtagtgttattttattaaaggttgattgttatattatggtatttagaatatattatataaaggtatatgtataaaaaagaagtttttaataatgttatttgtaaaaataaaaaaagttaatttttttttgattatttgaagttgtatatttagtagggtttaagttaggtttttgatttgtttcgttgttttttattattgtttgatatattgtgtgggttatttgtttgttgtttgtttttttttattagaatgtgagttttatgaggatttagtttttgtttgtttatttatcgttatgtttttagtaattgaaaatgtattaggtaaatagtagatgtttaataagaatttattttatgaataaatgggaaaaagataatttgagatattagtgtaggggttatatgaggaagaagaagggatatgagagttaattagttgggattgtttttgtaattaatttttattgagttttttgtgagtattaggtatttttttaggtgttggaatatggtaaggaacgaaatagggcgaaatatttgtgtttgtggagttgatatttattaaaagttggggaggttgggtacggtggttaatattagtaattttagtattttgggaggttgaggtgggtggattgtttgagtttaggagtttaagattagtttgggtattacggtgaaattttatttttattaaaatataaaaaaattagttgggtgtggcggcgtgcgtttgtaattttagttatttgggaggttgaggtaggagaattgtttgaatttaggaggcggaggttgtagtgagttaagattgtattatgtattttagtatgggtgatagagcgagattttgttttaaaaaaaaaaaaaaaaaaatttaagttggggagatagattatgtgaataaaataaataagtaaaattagtataatagataaatgttgagaagaaataatgaaatagggtaggtaggaatcgagtattgggggtggttgaaattttaggtatagggaaggtgatttttgaattagggttttacggtagagacggagagagttttaatgtttacgggaagagtatattaggtagaaggaagtgttagtttagaggttttgaggtgggatggtgtttgttatgtttaaggaatattaaggcggttagtgtggttggagtagagtgcggggaagggtagaaggtgaggttatataggtgatgggagttagatagtgtaggtgatatataggataggattgtaggggtagggggagaaggatgatatattagttaatagttaatatttgtggagtatttgttatatattagaggtatttttttgtttaaatattaatttttaaaggatgtttattatacggtggtgtttggaatgtattataaaaagatatatgtgttaaagatatttttaagaatgttagtttatatatgaataaggattttttttttttttaaaaggatatgtttataaaattgaggtatgtaatatgttttatggaggtataggtataaaagttgtttttaagagtgttagttgtatatgtgaataaggattgtgttgttgtattgaaagaatgtgtttataaaattgtggtgtatagttgggtatagaggttgaggtgggaggattatttgagtttaggagttttaggttagtttgtgtaatatagtgagattttcgttttcgaaaaaaaatttaaaaaataattattgtggtgtgtataatatatttttttaaaggtataggtataaaagatgtttttaagagtgatttgattttttggtatttgggtagtgttattttagtaaatatttattgttaaatattatggtgtttggaatatattatataaaggtatatgtataaaaaagaagtttttaataatgttatttgtaaaaataaaaaaaaaagttaattttttaagttttttatagaagtattttatagaattgatatagttaatttttatagaagttttggagggtaggtgtatttttgagaatatttgattttgagagtaaaatatttttattttatagatgaggaaataagtaaagagaggttgagtaatttgtttagggtaattttgagttagaatagttagaataggggtagaggaatataaggttgaagatttagaaagaagaatagatttgtaagggtaggtaggttatttggtatttttgattacgtagaggaagaatgaattttttttggaatgcgatgattgtgtaattgagtttatgaagtgagggaagagttttttttgcggggagagtagttcgtgtttatttttagaggttggaattgtttcgggaacggtagatagtttagggtggttgttttagagtttttgtatacgtcgttcgtttcgtttgaaggtttttttttatagagggtagtttggtttgttatttttttttttttaggttaggtgttatttttttggggaagaattttttgtatattttgtgtaaaaatagtatttttgttattttttaggattttatttttttttgtttttttttatggagaattggtggtgtaaggcgattgtttattagagttaaattatttaggttttgaatttcggttttgttaatttttagttgtgtgatttggggtaggttatttttttgtatttttattgttttatgtggaaaatgggggaaatgataatttttattttttaacggtggtttgaggatttaatgagttaaatgatttaaagagtgtgtagtttacggtaaggatcgtatgtttggtttgtatttttaaattattaaaatgtatttatagtatattcgtagatgtttgataggtttttgaaattgattatttttaaaattggtgtgattttttttaaaatttatttttttgtaaggtttttattttagttgattataatgttgtttttgtgggtgattaggttataaatttagatttattttggattttttttttatttttttcgggtatgttatttgttagtaagttttattttgtgtttaggttttttttagattttagttatttttcgttagttttattgttattattattatttatcgtagtggtttttttagttttaatagtttgttttttttataatcgttagggggattttgttgaaattttagttatagtttgttatttttttgtttataatttttttgtggtttttgttttatttaatattttgatagtattcgaaaaagtttggtttagtttggttttcgttattttgtttttttttttcgttgttttttttttttttttcgaatttatgttagttttttttttttatgttatttgttaggtattttttagttttgggttttttatatcggttgtcgtttttatttggtttgttgtttttagatatttacgagtttagtttttttatttttttttggtttttgtttagttgttttttttttggcgattatttttttttgattttttatgtaaaagtaatagtttttttttgtttgattttttttttataatttttattattatttgacgtatttttgtatatgtttgtttttttttttatttgttttttttgttaagatgtgagtttttttggagtagggattgttgtttgttgcgttttcgattgtattcgtagtatttggtttatagtatgtatttattaaatgtttgttaagtgaaggagatggaaagaagtaaatatatttaagtaaggtagattattagaatttttatgaggggttaagtgggagaaataataaaatataaagttttgtgtgttgttgaagttggaagtttatcgttattttttatttagttgataggttttgttgtagttgaaagaagaattggtaaaattgtttgtttttgttattaggagttattttgaattttttggatttttgaaataagtttgtttgtaaaataaatttagtgaggtttttggtgataggattttttaatcggatattttatggttttgtgatttgtataattgaataggaagtttatgtttatttttagtttgtttttaggaaagaaagtagtaatggggtgatagggaggattttgttttttgaaggatatgttgagagggaatagtcggtgtgaggggtcgtttagtttaatggtgaaatgtttagttaattggaatttgattgtttggttttaaatgttggttttgttatatgtggtttgtggaaggtacgtagatatttgtgttttcgttgttttatttataagttaatgataggaagattatttattttttagaggtatgattagggataaataagttaatgtttattaaaaaaaaaaataatagtataggtgtatatgtttttatttaaaatttttggggttagatgtgttttagaatttttatttttttatattttagaaaggtaatatgatgtatatacgatgttatataatattttttagtaagttttgtaatcggttgtgtttatatttttgtagtaaaatgtatgaatattcgtaataagtgagatttaataaagattagaaagggttttgttttattttaaattaggttttgttattaaaagagttaaaagaagttttttgtttttagagtattttggatgttggaatggtagataagggattatgaataaattagaaattaatatttagagtttattatatattttaggtatataatatttaatttgtataatatttttgtgaattaggtattgttatttttattttattaatgggtatattattatttttgttttatatatgagaaaattgaggtataaagaggttaaagaatattagttaagcgtggtgttttatgtttgtaattttagtattttaggaggttagggagagaggattgtttgagtttaggagtttaagaatagtttgggtaatatagtgagattttattttttaaaaaaagaaaaagaatatgtttagggttatatagttaataagtggtagaattaggatttaaatattggtaatttggttttagtgtttgggtagttgtttagtaggttatattgtttttttgtttagaagagtgtttgatgtgtattaagtttttaatagatgttaattattgttgttattaagaaagagaatatttagggtcgagtacggtattttatatttgtaattttagtattttgggaagttaaggtgggaggtgggtggattatttgaggttaggagtttaagattagtttggttaatatggtgaaattatgtttttattaaaaatataaaaattagtcgggcgtggtcgtgggtatttgtaattttagttatgcgggaggttgaggtatgagaatcgtttgaatttgggaggtagaggttgtagtgagttaagattgtgttattatattgcgttttagtttgggtaatagagagagattttattttaaaaaaaaagaaaaaaaaaaaaagaacgagaatatttagggatagtaataggatagagagattaggtatttatttagttttaggacggttttataaaggaaaggatttttgggttgggatttgaaagataagaaagattgttaggcgaaagaaggaagttttacgtggagtgagtagtttttgtaagggtttggtaaaaaaaaaattttttgaaaaatttgatattgatatggtagaagatatagataatatttaaatgaggaggatggaattagttttttatttttgttgtaataaataattataaatttagttgtttaaaataatatatttgttattttatagttttgtaggttagaagttttatattggttttagttgaaattaaggtattggtagggttgcgttttttttggaggttttaggggaaaatttattttttgtttatttaagttgttggtagaatttaattttttgagattgtaggattgaagtttttgtttttttattgtttgttagttgatagttatttttagttttaagaggttgtttatagtttttgattttgagttttttttttttatttttaaagttaataatggtaggttgagttttttttatattttgaattttttttgttttttttgttattatatttttgagttatttttttttttttattatttgttttttagagtttatatgattagattgaattttattaaataatttagaaataatttttttgttttagggtttgtaattttaattttatttgtaaagtttttttttgttatgtagtgtaaataatatataggtttcgaggattaggatgcggagtagggttggtattatttggtttattatagtttgttttttgatttttatagatttatatttgttttatatttaaaatatatttatattattttaagatatttatgagttgtattttattatagggagtattttaagtaagattggggagttagaagttagtttgggaaggtttagggaatgatggtagggtttgaagatagagatggagaaaagatgataaaaaaaggaatttttttttcgttgatttttgttttttttatgtttatagttttttaatttagttgtttgttttttagg

SEQ ID NO: 40 - DNA, 14147 bp, Artificial Sequence
  chemically treated genomic DNA (Homo sapiens)
tttggagagtaaatagttgagttgagaggttgtggatataggaggggtagaggttagcgggaggaggatttttttttttgttattttttttttatttttgtttttaaattttattattattttttaaatttttttagattaatttttagttttttagttttgtttgggatgttttttgtgatgggatataatttatgggtattttaggatggtgtgaatgtattttgaatgtgaaataaatgtgaatttgtgggggttagagggtagattgtggtaggttaaatgatgttaattttgtttcgtattttaattttcggaatttgtatgttatttatattatatagtagaaaggaattttgtagatgaaattaaggttataaattttaagatagggagattatttttggattatttgatgaaatttaatttaattatatgagttttgaaaagtagatgatggagaaagaaaggtagtttagagatgtgatgatagaagaggtaggggagatttaaaatgtgagagggatttaatttgttattgttggttttgaagatggaggaaggaggtttagaattaaggattgtgggtagttttttaaagttgggaatggttgttagttgatagatagtaaggaaatagggattttagttttataattttaaggaattggattttgttaataatttgaatgagtaggaaatggatttttttttagagtttttagaaggaacgtaattttgttaatattttgattttagttgagattagtgtgggatttttgatttatagaattgtaagataataaatgtgttgttttaagtagttaaatttgtgattatttgttatagtaagaatagaaaattagttttattttttttatttgaatattatttgtattttttattatattaatgttaagttttttaggaggttttttttttgttagatttttgtaaaggttgtttattttacgtggggtttttttttttcgtttagtagttttttttattttttaagttttagtttaaaggtttttttttttatgaagtcgttttaaaattgaatgaatgtttgatttttttgttttgttattgtttttgaatgttttcgttttttttttttttttttttttttttgagatggagtttttttttgttgtttaggttggagcgtagtatagtggtataattttgatttattgtaatttttgttttttaggtttaagcgatttttatgttttagtttttcgtatagttgggattataggtatttacgattacgttcggttaatttttgtatttttagtagagatatggttttattatgttggttagattggttttgaatttttgattttaagtgatttatttattttttattttggttttttaaagtgttaggattataggtgtgagatatcgtgttcggttttgaatatttttttttttgatgatagtaataattaatatttattgagagtttaatatatattaggtatttttttaagtagagaggtaatatggtttgttggataattgtttaggtattagggttagattgttagtgtttgaattttggttttgttatttattagttgtgtgattttgggtatattttttttttttttttaagaaatggggttttattatgttgtttaggttgtttttgaatttttgggtttaagtaattttttttttttggttttttaaagtgttaggattataggtatgaggtattacgtttggttgatattttttaatttttttgtattttaatttttttatgtgtaaaatagggataatgatatgtttattagtaaaatggggataataatatttagtttatagagatattgtatagattaaatattatatgtttgaggtgtatgataagttttaaatattagtttttgatttgtttatagttttttatttgttattttaatatttaaaatgttttaagggtagaaagttttttttaatttttttggtggtaaaatttgatttgaaatgaaataaggttttttttggtttttattgaattttatttattgcgagtgtttatatattttgttgtagaaatatgaatatagtcgattatagagtttattaaggggtgttatgtaatatcgtatatgtattatgttatttttttgaaatgtgaagaaatggaaattttgaaatatatttggttttaggggttttgggtaagggtatgtatatttgtattgttatttttttttttaatgggtattgatttatttatttttgattatgtttttgagaagtaggtagtttttttgttattaatttataaatgaggtagcggaggtataaatgtttacgtattttttataggttatatgtggtaaagttagtatttggagttaggtagttaggttttagttgattaagtattttattattaggttaaacggttttttatatcgattatttttttttagtatgttttttaaagaataggattttttttgttattttattattgtttttttttttgagagtaaattggaaataaatatgagttttttgtttaattatataagttataaagttatgaagtgttcgattagagagttttgttattagagattttattgaatttgttttgtaggtaggtttgttttagaagtttaaagagtttagagtgatttttggtggtaaagataggtaattttattagttttttttttagttgtaatagaatttattagttgagtgaaaggtgacggtgggtttttagttttaatagtatatagggttttgtattttgttattttttttatttgattttttataagagttttagtaatttgttttgtttagatatgtttatttttttttattttttttatttagtaagtatttggtgagtgtatattgtgggttaggtgttgcggatatagtcgagaacgtaatagataataatttttgttttagaggagtttatattttagtaggaaaggtagatgagaaaaaaggtaaatatgtataagagtgcgttagatggtggtaagggttatgggaaaaaaattaagtaggggagagttgttatttttatatggagagttaggggagagtagtcgttaaggaggggataattgggtagagattaaaaggaggtgaaggaattgagttcgtgagtatttgagagtagtaagttaggtggaagcggtagtcggtgtgaagggtttaaggttggagagtgtttggtaggtgatatggggagaggaggttgatatgggttcgggggagaggagggaggtagcgggagaggagaatagagtgacgggggttagattgagttaggttttttcgggtgttgttaggatgttgagtgagataggagttataagagggttgtgaatagagggatgataggttgtgattgagattttaataggatttttttggcggttgtgagaagaatagattgttggggttgaagaagttattgcggtagatgatggtggtagtagtggggttggcgagaagtagttggggtttggagaaagtttgaatatagaataggatttgttgatagatagtatgttcgggggaggtgagagaagggtttagggtgagtttaggtttgtggtttaattatttataaagatagtattgtggttagttgaggtgggagttttgtaggagagtaagttttgaggggggttatattagttttggagatggttagttttagaggtttgttagatatttacgggtatgttatgaatatattttaataatttaaaaatgtaagttaggtatacgatttttatcgtgggttgtatattttttgaattatttaatttattgaatttttaaattatcgttaaagggtggggattattattttttttattttttatatgaggtaatggaggtatagagaagtaatttgttttaagttatatagttggaagttggtagagtcggaatttaaaatttaagtggtttggttttagtgagtaatcgttttatattattagttttttatgaagagaaatagagaagggtaagattttagagagtgataggaatgttgtttttatatagggtgtataaggagtttttttttaaggaagtgatatttggtttgaaggaggggaggtagtaagttaggttgttttttgtgggggagggtttttaggcggagcgaacggcgtgtataaaggttttgaggtagttattttgaattatttatcgttttcgagatagttttaatttttgagggtaagtacgggttgtttttttcgtagggagagttttttttttattttatggatttaattatataattatcgtattttaggaagaatttattttttttttgcgtgattaaaggtgttaaataatttgtttgtttttgtaaatttgtttttttttttgagtttttagttttatgtttttttgtttttgttttggttattttggtttaaggttattttgagtaagttatttagtttttttttgtttgtttttttatttgtaaaatggggatattttatttttaaagttaaatatttttaaaagtatatttattttttaaggtttttgtgaggattaattgtgttaattttgtaaaatatttttgtaaaagatttgaggggttgatttttttttttgtttttataagtagtattgttaggaattttttttttatatatgtgtttttgtatagtatattttaagtattatagtgtttaataatgaatatttattgaaataatattatttaggtgttagaaaattaaattatttttagaaatattttttatgtttgtgtttttaggagagtgtattatgtatattatagtggttattttttgggttttttttcggagacggggattttattatgttgtataggttggtttggaatttttgggtttaagtgatttttttattttagtttttgtgtttagttatatattatagttttgtgaatatatttttttaatgtaataatatagtttttatttatatatataattagtatttttagaaatagtttttatatttgtgtttttatagagtatattatatattttagttttgtgaatatatttttttgaaaaggaggaaaatttttatttatatataaattggtatttttagaaatatttttgatatatgtatttttttgtagtgtattttaggtattatcgtgtggtaaatattttttgggggttggtatttgaatagaaaagtgtttttgatgtgtggtagatattttatagatattagttattagttagtgtgttatttttttttttttgtttttgtaattttattttatgtattatttgtattatttggtttttattatttgtgtgattttattttttattttttttcgtattttgttttagttatattggtcgttttgatgttttttgaatatggtaggtattattttattttagggtttttgaattggtatttttttttgtttggtatgtttttttcgtagatattaaggtttttttcgtttttatcgtgaggttttaatttaagagttattttttttatgtttaagattttaattatttttaatattcgatttttatttgttttattttattatttttttttagtatttgtttattatgttaattttatttatttattttgtttatatagtttgtttttttagtttgggtttttttttttttttttttgagatagagtttcgttttgttatttatgttggagtgtatggtgtaattttggtttattgtaattttcgttttttgggtttaagtaatttttttgttttagttttttaagtaattgggattataggcgtacgtcgttatatttagttaatttttttgtattttagtagagatggggttttatcgtgatgtttaggttggttttgaatttttgagtttaggtaatttatttattttagttttttaaagtgttaggattattggtgttagttatcgtgtttagtttttttaatttttaataaatgttagttttataagtataaatatttcgttttgtttcgttttttgttatattttagtatttagaagagtgtttggtatttataaggggtttagtaaaggttggttgtaggaatagttttaattaattagtttttatattttttttttttttttatgtgatttttatattggtgttttaaattattttttttttatttatttatgggataaatttttattgagtatttgttgtttatttggtatatttttagttgttggagatatagcggtgaatgagtagataaaaattgagtttttatgggatttatattttaatgaggagagatagataataaataagtaatttatatagtgtgttagatagtgataaagggtaacgggataaattagggatttggtttgagttttgttgggtgtgtagttttagatggttagggaggggttgattttttttgtttttataagtagtattgttaggaattttttttttatatatgtgtttttgtatagtatattttaagtattatggtgtgataattaatttttaatgaaataatattatttaggtataataaaattaaattatttttagaaatattttttacgtttgtgtttttaagagagtgtattatatatattatagtggttgttttttgggttttttttttttagaaaaagggatttcgttatattgtttaggttggtttggaatttttgggtttaagttatttttttattttagtttttcgagtagttgggattataagtgtatatttttgtgtttagttatatattatagttttgtgaatatatttttttaatgtaataatatagtttttatttatatatataattagtatttttagaaatagtttttatatttatgtttttatagagtatattacgtattttagttttgtgaatatatttttttgaaaaggaggaaaatttttatttatatataaattggtatttttagaaatattttttatatatgtatttttttatattgtattttatatattatagtgtggtaaatattttttgggggttggtatttgaatagagtgttgaaaggaattatgtagagatttgggggtggtgtttaaggtataaagaatagttaatgtaaaggttttgaggttggtttatgtttgttatgtttgaggagttgtgtggtggaattagtgtggttggagtatagtaagggggtgggaaggtataggcggtaatgttagaaaggttatttgttttattattaatttatagttaatatttatttatattggaagggattttagttttgattttttattttataaatgaagaaaaaggtatagagaggaagtggttaaattatttatttaaggttatatagttgttgggattggggggtgggtgggtgttgagagaaggtgaggaatgaagattgttttgtaggtagagggaatagtaagaataaaagtttggaggtgagaattaatttggtttttaaggattgaggttttacgtggggtgggatgagatttaagaggggagttttaaaaattattttgtgttttgagtattttttgggttatttttgagtaaggaatttaatttttttatggtttaatttttttattatttattttatggggttgtggtgaggattaaaggaatttatttatatgaaatattttgtttgatatacggtaggtgtttaataaacgttagtttttattggtattattattattattggcgttaatgtatttatttattgtagtgaggtagaacgtttttgtggttacgagtgtgattaggttgatttattattaagaggtggaggatagggaaggtcgtatagtgttttattataaggaaaagaggattagtacgtttttttttgggaagggaaaaaaaaagagaaggaaattgaaagtatacggtcgatttttttttaattataaagtattggatttacgggagggtatgcgggggattgtgtaagtatataggggtgtgggggaggaaggttaatgaatagatttattgtaaagggaggggtgatgaggtttatcgtttgaggggaaggggagtagaaaattttatagatttttgtattatagtgagaggagagaaaagttattatatagattgatttaaagtagagagggaaaaggttatggattgagttattgaaaatagggagatgtaaagtattaaattaatttattattaaaaaggagagaattttaagcgttagagcgatagtttacgaaaaagaggagatagggtaatggattgatagttaaagggacgtgaatttaaatatgaagattgatttattataaaatggtggtggtggtggtggggggggggggtggttttgaaaaaagttatggattgatgtattgggggattggaggaggtaggaatataaatttaggtagatttattgttaaagagggatgcggaggagtgcggcgttacggattgattcgttacgatgtataggaagggtggaataaataaggttacggacgggttttttgaaagttgaggttaggagaaatttaaatatttagatatatttattattaagggggttgaatattgttataggttagttttttataagtgggggtgggtggggggcgggtgggggtaggggtagggggaaagtttatggacgagtttattttaagttggcgtggggaaaaatataagtacgtagatcgatttattatataacgggagggggaggttaggttacggttagatttattataagggacgaagggtttgagtaatgttatacgtaggtttattagtcgtggtggtggcggcggggagtcgaatattagtaggttatcggttaagttatattttttgcgcgggggcgggaaggatacgtggggttacggattgggttttttattttttaggtttagagtttatttgtgtgtagcgtggcggtggcgttggtaatgttggtagtttcggggggcgggggttttatacgcggttttatcgttttttaggtttgggtttcgaggcggcggtggaggtggtggtggcggtggcggcggtagtatttagaagtcgtttttgcgtttttttatagtttacgtgggttcgaggaggaggagtttaatgtttcgtcgttcgttgattggttaaagcgttattaatcggtcgtaaggtttcgaggggttgggggacgggtttttttttatagagttgtgtcgtgattggcgtaaggggaaatgatggaacgtttacggtttttggagtttcgaggaggcgcgttcggtttttacggtgttttacgtcgattggtttaaggattgacggattgtgagtaattgaaaaggttcggggtttgtgtcgggggggcgggggtttgttttatattgattggtttatatgggattgatggaagatagtttttaaggacgggggtgggtggttttgtttttttttgattggcggacgagggatttttagatttttgttaaaatattaagggggcggtgtcgtacgttatgttgtttagcggaagtagggtttgtatagaaatgggcgtagtagtcggcgggagtgggtcggattgggtttcgcgtaggcgggtagggtagttttacggttagataagattatagagttgggtaaagacgaatttagaatatagcggaggtaggagggtaggatggttgttaggtatacgaaagagtattgagtggtagaaacgaaatgtttttagagggtagggttgaattgcggttagagttaaaaaggggaggaatttggttttgtattgattggcggtggttggatttaatttagaataggggttcgattagggagagcgggatttaggtttgtgtttattggaagttggaatatttataagtaggggttaagataaggtagggttgagttagggtttgggtgtaatttggggtatttggggaatgattgggtgtgtgaaagcgtaaattttagggttttttgattgttgtgggaatgaataaatttttattatgaattggtttattttttatggtaatttaaagggtggcgtttaggaaaaggaatggaagaaagggtgaggtggggggtttaggttgttaagatgatagaagagagggtagtgtataaggttaattggtaaatattgttaggtaataggttggaggtaggattgttggggtattttggaggttttatagagagattggatttttgggttttttagtaattttgtgttttaggaataggttttcgtggtaattagtagggtttatggggaaaaagaagggttatgtgatttaaaggtatttaggttttttaatgtttgaggatggggggaagaagttaatggtgaggtttttttgggaaattttgtaggttttgtagttttttaagtttttgaaaaagaggatagaagagattgaataaagattgggtttgggttacgtttttaggtttgttttgattttttttttttgattttagtttagagggaaagatggttttttttttttttcgtttttttttttttttaggttattattttaaatatagagtttggtagtggggtgagttgtttttatttttagtaatatgtggatatgggttttgatatttatggagtttttggtgaggttgttgttgagtttagagaaaagaaataagaaagggtaaaatgggttttatatgattatgatgatttttttttattattttaagatttatttatattttggatgatttttatttggtttatttttatgtggaaatgttaagttattatttggtttttattgatttaaagattattaaatgtttattgtatgttaggtaattttaggtattgggagatagtagtaaatataataaataaaattttcggtttgatggattttaaatttttgtaaagaaagatataataaaaaattaatggaataaaagttatgtgttagatggttttaattataataataaaaattaaaaatgagagataataaggagtataggagtggggggttgtaattttaaagagggtttagggatggttttacggagaagtatttgagtaaagatttaaagatagtgaattttgagtagtgtggttatatggaggatgtgttttatatataaggggtagtaaatataaaggtattgaggtgggagtgtgtttggtatgtttgaggtgtagtaaagaggttattttggttggagaagaataagtgaagggggaatgtaagaggtgaggttagagaggtaatgagggagataaattgtgtgaagtttataaggttatggtaaggattttggttttgattttaagtgagatgggagttaagggaaggttgtagtagaggaaggaggttgaattatatgaattagttagttgattttttttttttaagttagtttggattagatttcgtttaaaagaattttaattgatataaagggttaaggaaggttttttttaagaatgaagaatgagaaggaatcgaagaatgtttaatggttaagtagtaggaaggttttttttataaaaaggataagaggtaataaagagttgtttgagaagtagtgaggttagagtgttagaaattgagtggggagggaaagtggtttaagataaggtttaagagataggaagaggttagattatatagggttttaatataataaggaatgtggattttattgtgttgttaatgtaggagttagtttgaggggtaaatgaaattaaatattgttggaaaagtagagagtaataagataggatgttaaattggaaaaaaaagtagtatgaatttatgtatatattaatattttttatatttttatttttagtttagaatttttttttgaatttgattagttttaatgatattttttaaaaatttattttagtgtttaataagtgttttatatttaataggttttagattaaatttttgatttttttttttaaatttattttttttttaatttttttattttagataatggtaattttatttttttagttgtttagttaaaaatttgggttttttttttttatattttatatttagttagttattttttttaaaattatgattgttttattgtaggtaatgtttttgatttttatgatatgttttttttatagtattgttaatatttgatatattatattatttatttgtttattgtttgttttttttgattagaatgttagttgtatgagggtagattttgtttttttttgttttttgttttatttttagggattagaatagtgtgtggtatagaggaggtatttaacgtatgttgaatgaataagtgattattttattaaaaggaatttgaggttggttgagtgtatgtttagggataggaaataaatgaagtatgggtgttgttgttagagagtaagaatatttttaagaatattttgggggtaatgtttaaagaatagaagaatgaatttgattagtttttaagggataattttaatattaaaaaagagaataaaattagttaatggtgtaagtttattttatgaaaatttatgagtttaatattttaaaagggagaaaaatatagagtttattaaatgttagttgtaatataaaagggatatgtttattattgttgatttatttttatttgttatgtgagaagtaaattattattgatttagtatgtaaggtagtgtgaatagttatatggttatgtttttttttttttttttgagatggagttttattgtgtcgtttaggttggagtgtagtggcgtgatttcggtttattgtaatttttatttttcgagtttaagcgatttttttgttttagttttttaagtagttgggattataggcgtttgttatcgttttcggttaattttttgtatttttagtagagacggggttttattattttggataggttggttttgaatttttgatttcgtgatttatttatttcggttttttaaagtgttgggattataggtgtgagttatcgcgttcggtcgttaggttgttttttttataattatatgtttatttatgagatgtggatgtgtatttttttttgtgttattaggaaagaatatagagattttattttttttattttttaaataaagaaatatattaagaataggaagaattgatatttttgattatataaaatgattagaaagttagtttaaagtatattttaagtaattaaatatttttaaaggatagttagttatatagatttaaatttttattttttagaaaaattaaatttttagatagttttattaattataataaagtagtaagatttaattatattttttattatattaatagattaggttagtatattaaaaagattaggtaagggggtaggtattgataatttaaatattttattttggggaagtacgtggagttttaaaatattaaaatttatttgataggtttaggaattttgtgatataataaggaaagtttttttatataaattagattttagttgggcgcggtagtttatatttgtaattttagtatttagggaggttgaggtgggtagattatttgaggtcggagtttgagattagtttggttaatatggtaaaattttgtttttattaaaaatataaaaattagtcgggagtggtggtgggtgtttgtagttttagttatttgggaggttgaggtaggagaattttttaagtttaggaggtagaggttgtagtgagttaagatcgtattattgtattttagtttgggcgataagagtaaaatttcgttttaaaaataaagtggatttggtttaaatgattattagtttagaattgtgttgattatgaaagtaggtcgtttaattaaattatttgttaattggtttgaatattaagaattagaaattttagtaggtttgaggtttttttgggtttattagtatttgttagttttttttatggttggaaaggtttgaaaagataaaaattattgaaattttaagggaggtaattttggaaaaaatgaatgtagaatagatataaatataaaatataattaataaagaagtttaaattaatggtatttatatttgtgagatgttgttaatttaagtgtattgtttagtgttttt

SEQ ID NO: 41 - DNA, 3647 bp, Artificial Sequence
  chemically treated genomic DNA (Homo sapiens)
tatggtttagtttttagtttagttttgtgattttgggaaagtttttttagttcgtggaattttaaggtttaaggttttttttttgtaaaatggggaatgataatatttgttttttttggagttttggggatttagtgttttgaggaacgtggttgtaggttagagtggtatagagtagggtttaatgaagtatggcgtttatagtagtttttttgattggattaattttttcggatataatagtagggtaggggtggggtttggggagaaaggatatttttaattttgattttaatatttcgatggtttttaaggttgtttgtatatttatttaggtgtaagttttttaaggtgtggtgtgatgaattagtgatttttggagttaggttagcgtatttttttttcgtagggttgtaagttgtaggattgagaggtaggttgattaggttttgggttggatgatggggtgagagtaaggggttagttttgatatatgtttaatttttttttttagttttaagatattttgggtaaattgtttattttagtttttttgatttttattttaattttaatattagtttaagagaaaatagggatattgatggttatttagaagggttgttgtgttttatatatagtaatatttttcgaatgtttgtgatagcggtttaaggaataagttaattttatattattattttggatatttgtataaaattttattttatttttattatatgaatgtgttagggttgtttttttgttttgttttttttttttttttttgagatagagtttcgtttttgttgtttaggttggagtataatggcgcgattttggtttatcgtaattttcgttttttaggtttaagcgatttatttgttttagttttttcgagtagttgggattataggatgcgttattatgttcggttaattttgtgtttttagtagagatagggtttttttatgttggttaggttggtattaaattttcgattttaggtgatttatttgttttggttttttaaagtgttgtaattataggtatgagttatcgtatttagtcgtgttagggtttttttttgtttaatttttttttttttttttagtttttttttgtttgttttaatggagttttattttgttatttaggttggagtgtagtggtaagatttagtttattgtaatttttgttttttgagtttaagtaatttttttgttttagtttttcgagtagttgggattataggtgtttgttattatatttagttaatttttgtatttttagtagagatggggttttgttatgttggttaggttggtttcgaatttttgatttcgtgatttgtttgttttggttttttaaagtgttgggattataggtatgagtcgttatattcggttaatttttgtattatttttttaaagagagttttttaaattatataagttttaggttttataaaatttagatttgttttagtataattaaatttgggattatttattgagtaattattatgtgttaagtattgcgttgagtgtttttagagtattattttttttaattttagtatagtatgttagatgttgttttatagatgagttaattgagattagagatgtttagttatttgtttaaggtgatatgattgatatggaatagagttaagatttttttttttttttttgatacggagttttattttgttttttaggttggagtgtagaggcgtaattttagtttattgtaagttttgttttttaggtttacgtatttttttgttttagttttttgagtagttgggattataggtattcgttattatatttggttaattttttgtatttttagtagagatagggttttatcgtgttagttaggatggtttcgattttttgatttcgtgatttgtttgtttcggttttttaaagtgatggaattataggtgtgagttatcgcgattggttagatttaagatttgaatttaggtttttttggttttagaggtttttgttttttaattttttagtatgtatacgtatttgtttttttagaggtgtttgtttaagtgtgtttagtatatggaagtaagttagaaatgttaggtatatttgtaaagaggtgtgggagatgggggggagggaagagagaaagagatgttggtgttttttattttttagtttttgataggtgtttttgatttttttttgattagtatagttgtatttttggttggggtattttaattagaattgttaaatttagtatataaaaataaggaggtttagttaaatttgaattttagataaataatgaataatttgttagtataaatatgttttatgtaatattttgttgaaattaaaaaaaaaaaaaaaagttttttttttatttttatttttattattaggtttaaggaatagggttaggggttttaaatagaatgtggttgagaagtggaattaagtaggttaatagaaggtaaggggtaaagaagaaattttgaatgtattgggtgttgggtgtttttttaaataagtaagaagggtgtattttgaagaattgagatagaagtttttttgggttgggtgtagttgttcgtggttgtaattttagtattttgggaggttgaggcgggaggattatttgagtttgggagtttaagattagttttattaacgtggagaaattttgtttttattaaaaatataaaaaatttagttggttatggtggtatatgtttgtaattttagttgttcgggaggttgaggtaggagaattatttgaattagggaggtagaggttgtggtgagtagagatcgcgttattgttttttagtttgggtaataagagtaaaagttcgtttaaaaaaaaaaaaaagttttttcgatgtgattgtttttttttaaatttgtagatttttttaagattatgttttttagatattttaaagattttagaagatatgtttcgggggttttggaagttataaggtaaatataatatatttttttttttgattattaattttattagaggatgtggtgggaaaattattatttgatattaaaataataggtttgggatggagtaggatgtaagttttttaggaagttagataattgagatttaaagggtgttaagagtggtagtttagggaaatttatttcggatttcgggggagggggtagagttattagtttttgtatttagggatttttcgaggaaaagtgtgagaacggttgtaggtaatttaggcgtttcggcgttaggagggacgatttaggtttgcgcgaagagagggagaaagtgaagttgggagttgtcgatttttagatttcgttggaatgtagttggagggggcgagttgggagcgcgtttgtttttaattatcggagaaggaggaggtggaggaggagggttgtttgaggaagtataagaatgaagttgtgaagttgagatttttttttattgggatcggagaaattaggggagtttttcgggtagtcgcgcgtttttttttacggggttttttattgcgtcgcgcgttcggtttttatttttcgtagtatttcgcgtttcgcgtttttttagtcgggtttagtcggagttatggggtcggagtcgtagtgagtatt

SEQ ID NO: 42 - DNA, 3647 bp, Artificial Sequence
  chemically treated genomic DNA (Homo sapiens)
ggtgtttattgcggtttcggttttatggtttcggttggattcggttgggagggcgcggggcgcggggtgttgcgaggggtgggggtcgggcgcgcggcgtagtaaagggtttcgtgggaaggggcgcgcggttgttcggggggtttttttggttttttcggttttaatggaggggaattttagttttataattttatttttatatttttttaagtagttttttttttttatttttttttttttcggtgattgggagtaagcgcgtttttagttcgttttttttaattgtattttaacgaagtttgggagtcggtaatttttagttttatttttttttttttttcgcgtaggtttgggtcgttttttttagcgtcgggacgtttgggttgtttgtagtcgtttttatattttttttcggagaatttttaaatgtagaggttggtgattttgttttttttttcggagttcgggataaatttttttaggttgttatttttaatattttttaagttttagttatttaattttttggggagtttgtattttattttattttaagtttattgttttaatattaaataatggtttttttattatattttttagtaaaattgatagttaaggagggggatgtgttgtgtttattttgtggtttttaggattttcggggtatattttttggaatttttgaagtatttgaaaagtatgattttaagagggtttataaatttgggaggagatagttatatcgaaaggatttttttttttttttaaacgaatttttgtttttgttgtttaggttggagagtaatggcgcgatttttgtttattataatttttgtttttttggtttaagtgatttttttgttttagtttttcgagtagttgggattataggtatgtgttattatgattagttgaattttttgtatttttagtaaagatagggtttttttacgttggtgaggttggttttgaatttttaagtttaggtgattttttcgttttagttttttaaagtgttggaattataattacgagtaattgtatttagtttaaaaagatttttattttaattttttaaaatgtattttttttgtttatttaaggaggtatttagtatttaatgtatttaaggttttttttttgttttttgttttttattagtttgtttaattttattttttaattatattttatttggagtttttgattttattttttaggtttagtggtaggggtggggatggaaggaagatttttttttttttttttaattttaataagatattgtatgggatatatttatattaataaattatttattgtttatttgaaatttaaatttaattgggtttttttatttttatgtgttaaatttggtagttttagttggaatgttttagttaagaatgtagttatattggttaagaagggattaaaggtatttattagggattggagaatgaaggatattagtatttttttttttttttttttttttttattttttatatttttttataggtatatttagtatttttaatttgtttttatgtgttgagtatatttaagtaggtatttttagagggataggtgcgtatgtatgttagggagttgagaaataggggtttttgggattaagaggatttgggtttaaattttgaatttggttagtcgcggtggtttatatttgtaattttattattttgggaggtcgaggtaggtagattacgaggttaggagatcgagattattttggttaatacggtgaaattttgtttttgttaaaaatataaaaaattagttaggtgtggtggcgggtgtttgtagttttagttatttaggaggttgaggtaggagaatgcgtgaatttgggaggtagagtttgtagtgagttgagattgcgtttttgtattttagtttgggagatagagtgagatttcgtgttaaaaaaaaaaaaaaaaattttgattttattttatattagttatgttattttgggtaagtgattgagtatttttggttttagttggtttatttgtaaaatagtatttgatatattatgttggggttaaaggagataatgttttggaagtatttagcgtaatatttggtatataataattgtttaataaatggttttagatttagttatattggggtagatttaggttttgtggggtttgaagtttatataatttgggaaattttttttaagaaagtaatataaaagttggtcgagtatggcggtttatgtttgtaattttagtattttgggaggttaagataggtagattacgaggttaggagttcgagattagtttggttaatatgataaaattttatttttattaaaagtataaaaattaattaggtgtggtggtaggtatttgtaattttagttattcgggaggttgaggtaggagaattgtttgaatttagagggtagaggttgtagtgagttgagttttgttattgtattttagtttgggtgatagagtaagattttattgaaataaataaagagaggttaaagagagagaaaggaattgaatagaaaaagattttagtacggttgggtgcggtggtttatgtttgtaattgtagtattttgggaggttaaggtaggtggattatttgaggtcgggagtttggtattagtttgattaatatggagaaattttgtttttattaaaaatataaaattagtcgggtatggtggcgtattttgtaattttagttattcgggaaggttgaggtaggtgaatcgtttgaatttgggaagcggaggttgcggtgagttaagatcgcgttattgtattttagtttgggtaataagagcgaaattttgttttaaaaaaaaaaaaaaaaaataaaataaaaaaataattttagtatatttatatagtaaggataaggtggagttttgtataggtatttagagtgataatgtaaaattaatttattttttggatcgttgttataaatattcgagaaatattgttgtgtatggaatatagtagtttttttggatggttattaatatttttatttttttttgagttggtgttagggttagggtgaggattaggggaattgaggtaagtaatttgtttaggatgttttagggttagagagaaaagttgggtatgtattaaaattgattttttatttttattttattatttagtttaggatttggttaatttgttttttagttttgtagtttatagttttgcgggaagaggatgcgttgatttggttttaggagttattggtttattatattatattttggagggtttgtatttggatgagtgtgtaggtagttttagaggttatcgggatgttaggattagggttagaggtgttttttttttttaggttttatttttgttttgttgttgtgttcggaaaggttagtttagttaggaaagttattgtggacgttatgttttattggattttattttgtgttattttgatttatagttacgttttttagaatattgagtttttaagattttagaggaggtaggtgttattattttttattttgtagaagaggaattttgagttttgagattttacgagttaaaggaatttttttaaggttatagagttgagttgggaattgagttatg

SEQ ID NO: 43 - DNA, 5312 bp, Artificial Sequence
  chemically treated genomic DNA (Homo sapiens)
gtcggtttcgggggtcgacgatttttcgggtaggcgacgtgttttgtttaggttttatttttcgcgttcgtaaaacggggtggataacgtagtttaaggtagagtcgcgttaaggtttttcgttgtcgtcgggttttggcggtttgatcgggtttggggttcgagcgtgttttcgggtttgggggggtcgtcgcgatggattcgttggtagcgttttaggatcgtttggtggagtagttgttgtcgtcgcggatttaggtttagaggcggtttaaggtgcgtgtgtggagagggcggaacgtgggtttgtgatttcgcgggtttcgggattcggtatggggttttcgttttcgcgcgttacggttcgttagcgtttaggtttagttttttttttcgtagcggtttcgtaggttcgcggttttacggtggggcgacgtgttttgtttaggttttattttacgcgattttaaaacgcggcggagaatgcggtcgtgggatttttttaggggttttaagggtttgcgggggttgggcgtttgggcgcgcgggcgggggaggttcggcgtcgcggtttataaataggcgttgtttcgttatcgtcgttgtcgtcgttttcgcggttggattcgggttaggtggggtttttcgttttttggtatttttcggaggggtgagtgtcgaggtttttagttttttcggtttatggagggttttgagtgtgttttaggggttttaattttgttgttttttgttcgaggagggaggatatcgtttgtgtttgttgcggtttgatatttttttacggaataaatatagtgtcggtttttgtagagttttttttgggattggggttaggggtgtttttttttgttattatttcgtttgtttttttatttttaggtttttgtttacgggttttttttttatttttgttaacgaaatgttttattttgggaatcgtattttttgttgtttttttatatcgtatttggtaagagatagggtattgggtttttggagaaatttttgtgtttttattttgttttattttgtttttaggatattgataagtagtacgtgggtttcgttatattgtttaattaggtgtatcgtaagtcggtgaagaaaggttttgattttatatttatggtggttggtgagtgggttaggtttttcgggggagtggttggggttattggttagttaagttttgtcgttggagttttagatttaacgtagttttttttttgtatttgtgtgtaggtgagttaggtttggggaagtttatattggtttatagtttttttttgatagatttgtataaggatcggaagttgtttagtgttgagggtgagtggtttttaggaggttttggtattgatttttagtttttttttatgggatttttttaaggatttttttttaggtttagtttttattgttttgttttcgcggtgtgggttttttgggggtagggttaaggtattaagatggatgaggacgagggttttggttgttaagggtgaggggttgagggttggagaggtttttttagtggtttttttttcgtagagcgtattagttagacggtagagattttaaaatatacggtggatattgaggagaagggagttaagttgaagtttattatcgtggatacgtcgggattcggggacgttgttaataatatcgagtggtgagtgaggtttgttgagaaaggttttgtttaggcggttatagtattcgaggtttggttttattttttttttgtttatagttggaagtttattatcgattatgtggattagtagtttgagtagtattttcgtgatgagagcggttttaatcgaaagaatatttaagataatcgagtgtattgttgtttatattttattttttttttcgggtatgggtgtgtggttgttttggggttaggttcgggagtgtagtttttataatatggttttttggttgtgtttatgtttatttttggttgttttcggtaggttgcggttagtggatgtgggttttatgaaggtattgtatgagaaggttaatatcgtgttttttatcgttaaagttgattgttttgtttttagtgagattcggaagttgaaggagcgggtgagtttgtcgtcgtataggggtttggttagggttttggggttgagagtattagggggatttgtttggttttaaatttgatggtttttgttttattatagattcgggaggagattgataagtttgggatttatgtatattagttttttgagtgtgattcggacgaggatgaggattttaagtagtaggatcgggaattgaaggtgaatatgtagattggtggggtaggggggatggagttggtgaggggtagaattagagggttttgttttttttatattgagtttgttggaggagggttaggttagtttagttgggtgtaagagttatttgttttaggagtagaggatttgtattttttttatttagggttagaaggtaaaggttattatgtttttgtttggttggggtgggttatgtgggtttcgtgtggtgtttggtaggtatggagtatttgtttagatttagaggtgtagtagtgggttaggtttttaattttaattttttttttatgggttattagaggaaggggttgttttagtggtatattttggtttttagatttttgagttttagggttggtggttttgggtgtttcggtagttagagtgatgatggagattatgttaggggtaggtggttattagggtaggggtattagtatggggagatataggtttagttttggggagggaaggggtagttggagggggtggtttttgatgagggaggagatgaggagggagtatgtttggttgggtatagtttggaaaggttttggaatgtgagttatatgggttttggttttagttaggggtagagaggttagaaaggggtaacgttaggatttttttgaggagagatagttgatggtgatgttggaggggtgtttcgggagttatatgttcgttttttattagtaatcgtgtaattacgtttatcgggtgtgagttttttttttttttttttttaggagagcgcgtttttcgtcgttataggtagtaatacggtggtggaggttaaggggtagcgggttcggggtcgattgtatttttgggggatcgtggagggtgagtagagttttggggtattaggtttggtgggggaaggttgttttgggtcggcgttagtttattatttatttttatttcgtagtggagaattaggcgtattgcgatttcgtgaagttgcgtaatatgtttattcgtacgtatatgtacgattttaaggacgtgacgtgcgacgtgtattacgagaattatcgcgcgtattgtatttagtagatgattaggtgcgcgttttagtcgcgagttagatttcgtttttttggtttcgtttacgtttttataattgagggtcggttttgttagtttatttagatttgaattttgtattattttttaagtttttttttttttttagagtttggtttttttagaattaagtttagggttgtgagggtttcggagggtagggttttagtagtggcggggatgggttaggtatcgttagtttacgttgagtttttcggtggcgtcgtttcgtttattttttttttcgtttcgcgtagtaaattgatttaggatagtcgtatggagagttttatttcgattttgtcgttgtttatttcggacgtcgagattgagaagtttattaggatgaaggatgaggaagtatgtggggcggcgggggcggcggaggcgggcgttagggatgttttttcgcggtgttgtttattcgtcgggttgttttcgttcgtagttgaggcgtatgtaggagatgttgtagaggatgaagtagtagatgtaggattagtgacgttcgtcgcggatatatcgttcgttttcgggacgttttcgtatttttggatattagatcggattgttttcgattcggagacgcggggttatagtttttagttgattttaatttatttttagtattatttttttttaggttattgtgtttgttttcgaggggtttggatcgtagttttcgtttagttggttttttttgattttgggggattaggagcgaagttgggcgggattttagagattcgttttttttgtttttttttcgttttcggacggttatagtatttaaatcgtaggttttgttttggtaggtaggtaaagttaggtagaagaggatttttaggattttgggtttgttttttgttttagtgttgtagaacggatttgggagtttttttttgtttgttttcgcgggttatttagcgagtgttgagattttattttttgtcgaggcgggtcgagtttttttttatttttagacgtttagcgggtagggttgggttgaattaaatgggagttttttagatataaggaggttagaggttgtaaggagcggggtcgtgatcgtttatattttttttttatagttcggttcgatttggagggttttcggggtattgggcggtgagttattttttggtaattttcggtgtcgttttttgttttcgttcgaggttttttttttttagtatcgttgtggtgtgtcgggattttgagtttaggtttttcgatgtttttattcgtatgattttttttcgttatacgatgtttcgttttttttcgttgtgaatgtcgcgttttgttttggtgataggagaataatgttggtgaacgtcgtagcgggtgttcgagtgtttcgtgtgtttttgagagcgggtgggagcggaagtttgagcggtttgcggttttcggcgatagtgtgttatttgtcgttgtagcgcgcgttcgcgcggtttttgggttatttttggttaggtcgtagtattgtggtcggtgcgggcgtggtaggggcggggcggttttatcgttcggttttttcgtttacgtttttcgttgtagagtaagtcgggttgtcgttttttcgttatgggtttcggtgagtttggagttcggtcgggttttcggttgttttttaggtcgattcgggttgagaggagttttggtcgtttggttgtagttgggagagatttgggttagatttagaggggatttttagtcggcgtgcggggtggttagggtggagaggttggcgggttatcgggacgtcgggtattaggggttggatggagtcgggtcggtagtttgggtatttagagatgtcgtttaggtgttcgtcgatcgttcggtttattgcggcgttttttttgtagg

SEQ ID NO: 44 - DNA, 5312 bp, Artificial Sequence
  chemically treated genomic DNA (Homo sapiens)
tttgtaagggaagcgtcgtagtaagtcgagcggtcggcgggtatttgggcgatatttttgagtatttagattgtcggttcggttttatttagtttttgatgttcggcgtttcggtagttcgttagtttttttattttgattatttcgtacgtcggttggaagttttttttaagtttgatttaagttttttttagttgtagttaaacgattagagttttttttaattcgggtcggtttagggagtagtcgggggttcgatcggattttagatttatcggagtttatggcgagaagacggtagttcggtttattttgtagcgggaggcgtaggcgggagagtcgagcgataaggtcgtttcgtttttgttacgttcgtatcgattatagtgttgcggtttggttagaaatagtttagaggtcgcgcggacgcgcgttgtagcggtagatagtatattatcgtcggaggtcgtaggtcgtttaggttttcgtttttattcgtttttaggggtatacggagtattcggatattcgttgcgacgtttattaatattgtttttttgttattaggataggacgcggtatttataacggaagaaaacggagtatcgtgtggcgggaagggattatgcgggtgggaatatcgggaggtttaggtttaggatttcggtatattatagcggtgttggggagaagaggtttcgagcgagggtaggggacggtatcgagagttgttaggaggtggtttatcgtttagtgtttcgggggttttttaggtcgggtcgggttgtggagaaggggtgtaagcggttacgatttcgttttttgtagtttttggtttttttatgtttggagggtttttatttgatttagtttaattttgttcgttaggcgtttggggataagggaagattcggttcgtttcgatagaaaatggggttttagtattcgttgggtgattcgcgggagtaggtaaaggagggtttttaagttcgttttgtagtattggggtagggaatagatttaggattttgggaatttttttttgtttagttttgtttgtttgttagagtagggtttgcggtttgggtgttgtgatcgttcgggggcgggggaagggtaagggaggcggatttttgaagtttcgtttaatttcgtttttgattttttaaggttagagagggttagttgggcgggggttacggtttaggtttttcggaaatagatataatgatttgggagggggtggtgttgagaataaattagggttagttgggggttgtggtttcgcgttttcgggtcgggaatagttcggtttggtgtttaggggtgcgagggcgtttcggagacggacggtgtgttcgcggcgagcgttattggttttgtatttgttgttttattttttgtagtattttttgtatgcgttttagttgcgggcggagataattcggcgggtgagtagtatcgcggaggagtatttttgacgttcgttttcgtcgttttcgtcgttttatatatttttttattttttattttgataagttttttagtttcggcgttcggggtgggtagcggtaggatcgggatggggttttttatgcggttgttttgggttagtttgttgcgcggggcgggggggaggatgggcggggcggcgttatcgggaggtttagcgtgggttggcgatgtttggtttattttcgttattgttgaggttttgtttttcggagtttttatagttttggatttggttttagggagattaggttttgggggagggggggggtttagggaatggtgtaaagtttaagtttgggtgggttgataggatcggtttttagttatggagacgtgggcggggttagaggggcgaggtttggttcgcggttggggcgcgtatttggttatttgttggatgtagtgcgcgcggtagttttcgtagtgtacgtcgtacgttacgtttttgaggtcgtgtatatgcgtgcggatgagtatgttgcgtagttttacgaagtcgtaatgcgtttggttttttattgcggggtgggggtgggtagtgggttggcgtcggtttaggatagtttttttttattagatttggtattttaagattttatttattttttacgattttttaggggtatagtcggtttcggattcgttgttttttggtttttattatcgtgttgttgtttataacggcgaagggcgcgtttttttgggggaaggagggagaaaggtttatattcggtgagcgtaattgtacggttattgatgggaaacgggtatgtaattttcggggtatttttttagtattattattaattatttttttttaaagagattttggcgttgtttttttttggtttttttgtttttggttggagttagagtttatgtggtttatattttagggtttttttaggttatgtttaattaggtatgttttttttttatttttttttttattaagaattattttttttagttgttttttttttttttagggttgagtttatgtttttttatgttgatgtttttgttttggtggttatttgtttttggtatggtttttattattattttagttgtcggggtatttaaagttattaattttggagtttagaaatttgggagttagggtgtgttattggggtagtttttttttttggtgatttatgggaagagggttggggttgggggtttggtttattgttgtatttttggatttgggtaagtgttttatatttgttaagtattatacggggtttatatgatttattttagttaggtaaagatatggtgatttttattttttagttttggatgaagggggtataggttttttatttttagaataaatgatttttgtatttaattgggttgatttggtttttttttagtaggtttaatgtgaaggagataaagttttttggttttgttttttattagttttattttttttgttttattagtttgtatgtttatttttagttttcggttttgttgtttgaagtttttattttcgttcgagttatatttagggaattggtatatatggattttaaatttgttaattttttttcggatttgtggtggggtaaggattattagatttgaggttagataagtttttttggtatttttagttttagggttttggttaggtttttgtgcgacggtaggtttattcgtttttttagttttcggattttattggggataagatagttagttttggcgatgagaggtacgatgttgatttttttatgtaatgtttttatgaaatttatatttattggtcgtagtttgtcgagagtagttaagggtgggtataggtatagttagggggttatattgtaggggttgtattttcgagtttggttttaggatagttatatatttatgttcgaagggggagatgaagtataggtagtagtgtattcggttgttttggatgttttttcggttgaggtcgtttttattacggaagtattgtttaaattgttggtttatatagtcggtgatgggtttttagttgtgggtaggagggaggtgaggttaggtttcgagtgttgtggtcgtttaggtaaggttttttttagtaggttttatttattattcggtgttgttgatagcgttttcgaatttcggcgtgtttacgatggtgagttttagtttgatttttttttttttaatgtttatcgtgtgttttagaatttttatcgtttggttgatgcgttttacggggaaggggttattggaagggtttttttaatttttagttttttatttttggtagttaggattttcgtttttatttattttggtgttttggttttatttttaggggatttatatcgcgagaatagaatagtgggagttggatttgaaagggagtttttggagaggttttatggaaggggattggggattagtgttagggttttttgggggttatttatttttagtattgagtagttttcggtttttgtataagtttgttaggaagaggttgtggattagtgtggatttttttaggtttgatttatttgtatataggtatagagaaggagttgcgttaggtttggggttttaacgatagagtttggttggttagtgattttagttattttttcgaggagtttggtttatttattagttattatgagtgtgaagttaaagtttttttttatcgatttgcggtgtatttggttgggtagtgtggcgaagtttacgtattgtttgttaatgttttggggataggatggaatagggtagggatataaaggtttttttagaagtttaatattttgttttttattaaatgcggtatgaggagatagtagagggtacggtttttagggtggggtatttcgttggtaaaaataaggggagggttcgtgggtaaaagtttggagataagaaggtaggcgaggtggtggtaggagaaggtatttttggttttaattttagggagggttttgtagggatcgatattgtatttatttcgtggggagatgttaggtcgtagtaggtataggcgatgtttttttttttcgggtagagggtagtaggattgggatttttgggatatatttaaggttttttataagtcggagaagttgggggtttcgatatttattttttcggagagtgttagggggcgggaggttttatttggttcggatttagtcgcgggggcggcggtagcggcggtggcggagtagcgtttatttatagatcgcggcgtcgagtttttttcgttcgcgcgtttaggcgtttagttttcgtagatttttggggtttttggaggggttttacggtcgtatttttcgtcgcgttttggagtcgcgtgaggtgaggtttggatagggtacgtcgttttatcgtggggtcgcggatttgcgaggtcgttgcggagggaagggttgagtttaggcgttggcgggtcgtggcgcgcggggacggggattttatgtcgagtttcggagttcgcggggttatagatttacgtttcgttttttttatatacgtattttgagtcgtttttgggtttgggttcgcggcgatagtagttgttttattaggcggttttggggcgttgttagcgagtttatcgcggcgatttttttaggttcgggggtacgttcggattttaggttcggttaggtcgttagagttcggcgatagcgagggattttggcgcggttttgttttaggttgcgttgtttatttcgttttgcggacgcgggaagtgaggtttggatagggtacgtcgtttattcgggggatcgtcgattttcgaggtcgat

SEQ ID NO: 45 - DNA, 4858 bp, Artificial Sequence
  chemically treated genomic DNA (Homo sapiens)
ggaatttttttttttttttttttttttgaaatagggtttcgttttgttatttaggttaaagtgtagtgtcgcgattttagtttattataatttttgttttttaggtttaagggatttttttattttagttttttaagtagttgggattataggtatgtgttattatattcggttaatttttgttttttttatagagatagggttttattatgttgtataagtcggttttgaatttttgagtttaagtgagttatttgttttggttttttaaagtgttgggattatatatgtgaattatcgtattcggttttaaaaatgtttttttaagcgtaattacgtaatgttagttgtagtttagatttttggatgttaatttaaaatagttttataggaatttagtgtggtggtttacgtttgtaattttagtttgaggtaggtggattatttgaggttaggagttcgagattagttgggttaatatggtgaaattttgtttttattaaaaatataaaaaaattagttgggtatagtggtaggtattcgtaattttagtttttcgggacgttgaggtagaagaattgtttgaatttaggaggtagtggttgtagtgagtttagatcgtgttattgtattttagtttgggtaataagagtaaaattttgttttaaaaaaattaattaatttaggttgggcgtagtggtttatgtttgtaaattttagtattttgagaggttgaagcgggtggattatgaggttaagagatcgagattattttggttaatacggtgaaattttatttttattaaaaatataaaaaaaaaattttaaaaaataaaaaaataaaaataaataaataaattaaaaaaatataataattagttaggcgtagtggtaggcgtttgtaattttagttagtcgggaggttgaggtaggaggagaatggagtgaatttaggaggtagagtttgtagtgagttgagatcgcgttatagtattttagtttgggtaatagagcgagattttattttaggaaaaaaaaaattaattaattaaaaaaatagtaagataaataatattttttttattttagtaaaaggatgaagttagttttttaatgaataaaaataagagattgttgaatgttaagttttatagatagtttagataatatagggagatattatttttatatatatatatatatatatatatatatatatatatatatatatatatatatatataaaatagttgcgtatggtggtatgggtttgtagttttagttattggggtagggttagggggtgggaggttgaggggagaggatgttttaatagggaggttgaggttgtagagagttatgattacgttattgtattttagtttgggtgatatagtaagattttgttttagaaaaaaaaaaaagaaaaaagttaagaatgtatttttgaggaattttattaataaaatgtattaaatatagttaaagagttttttgttatatgttaagtggaaagttatgaagaaagagaagaatagaagtaggaggatattggtttttattttttatttttttaagaagtaagatttattattttttaaaaagtttaaatattggtaaggtaagatataatttttatttataatattgtatttttgtttttaggtaataaattaaatgttagataaaagtataatatttattatttaatttttaggttttagtatagaatttataaatattttgttggttaaggtaaaaaggtgtattgtatttttagagagtttgtagagttttgagtattaattttataatttttatattttaatttatataaagtattattaggttaagaaatagattatatagtaggtataatatttttgggtatgtaaatatgttaaggattaaagtaagaaaagagtaattataggggttatattatatttgttaaaaagtgatttgtttaaaaattaaaaagaagtcgggtgtagtggtttatatttgtaattttagtattttgagaggttggggtgggtggattatttgaggttagtagtttaaaattagtttggttaatatagtgaaattttatttttattaaaaatataaaattaggcgtggtggtaggcgtttgtaattttagttattagggatgttgaggtaggagaatcgtttgaattcggaaggtagaggttgtagtgagttaaaatcgtattattgtattttagtttgggtaataagagtaaaattttgttttaaaaaaaaaaaaataaaaataaaaataaaaaagaaatttagtttatttttttgtgtaatttttaataaattgttgagaagtgattttatataggaattttgtataatttattttgatgcgttcgaggtggtcgttagttgatttcgcggagtttatttttttggttttttcgttttaacgtcgttcgttttttagttaggatgtttgttcgtggttcggttatcggtatcgatttgggtattatttattcgtgcgtcggggttttttaatatggtaaggtggagattatcgttaacgattagggtaatcgtattatttttagttacgtggtttttacggatatcgagcgttttatcggcgacgtcgttaagaattaggtggttatgaattttattaatattattttcgacgttaagaggttgattggacggaaattcgaggatgttatagtgtagtcggatatgaaatattggtcgtttcgggtggtgagcgagggaggtaagtttaaagtgtaagtagagtataagggggagattaagattttttttttagaggagatattttttatggtttttacgaagatgaaggagatcgcggaagtttatttggggggtaaggtgtatagcgcggttataacggtttcggtttattttaacgattcgtagcgttaggttattaaggacgtaggtattattacggggtttaatgtgttgcgtattattaacgagtttacggcggcggttatcgtttacggtttggataagaagggttgcgcgggcggcgagaagaacgtgtttatttttgatttgggcggtggtattttcgacgtgtttattttgattatcgaggatggtattttcgaggtgaagtttacggtcggcgatatttatttgggcggtgaggatttcgataatcgtatggtgagttatttggcggaggagtttaagcgtaagtataagaaggatattgggtttaataagcgcgtcgtgaggcggtcgcgtatcgtttgcgagcgcgttaagcgtattttgagttcgtttacgtaggcgagtatcgagatcgattcgttttacgagggcgtggatttttatacgtttattacgcgcgttcgtttcgaggagtttaatgtcgatttttttcgcgggattttggagtcggtggagaaggcgttgcgcgacgttaagttggataagggttagatttaggagatcgtgttggtgggcggttttattcgtatttttaagatttagaagttgttgtaggatttttttaacggtaaggagttgaataagagtattaatttcgacgaggcggtggtttatggcgtcgcggtgtaggcggttatttttatcggcgataaattagagaatgtgtaggatttgttgttattcgacgtgatttcgttgtcgttgggtatcgagatagttggcggtgttatgattttatttattaagaggaatattacgatttttattaagtagacgtagatttttattatttattcggataattagagtagcgtattggtgtaggtatacgagggcgaacgggttatgattaaggataataatttgttgggtaagttcgatttgatcgggattttttttgcgtttcgcggggttttttaaatcgaggttattttcgatattgacgttaatggtatttttaacgttatcgtcgtcgataagagtatcggtaaggaaaataaaattattattattaatgataaaggtcgtttgagtaaggacgatattgatcggatggtgtaggaggcggagcggtataaatcggaagatgaggcgaatcgcgatcgagtcgcggttaaaaacgttttggagttttatatttataatattaagtagacggtggaagacgagaaattgaggggtaagattagcgagtaggataaaaataagattttcgataagtgttaggaggtgattaattggttcgatcgaaattagatggtagagaaagatgagtatgaatataagtagaaagagttcgaaagagtttgtaattttattattagtaaattttattaaggtggttttggcggcggtagcggcggcggcggtttaggagttttcgggggatttattatcgaagaagtggattaagtttgtatttaagttagcgtaaatttttttgtttttttttttttttttttttttttgtttgtttttttgaaatgtttttgtgttaagtacgagatttattgttggaagtttttggtatatgtaaatgaaaggagaggtgtaataatttagtttaattataaaagttttaaagtttgttttttaaaaatattattcgaggtttttttttaatgtattttgcgtgtttgttgatttgagtatttttgattagttcgtgtatggagatttgtttgagatgagaaattttaagtttgtatatttgttttgtagaagtttggaaatagtaaaatatataggagtttaaattgtttatttttatgtattattttaaaattaaattgaatattgtagtaatgttaaggataggtatattttttgtaaataaatgtataaaatgtaaatgtaaagtaaagttgaaattgattttaaaaaaaaaaaa

SEQ ID NO: 46 - DNA, 4858 bp, Artificial Sequence
  chemically treated genomic DNA (Homo sapiens)
ttttttttttttgagattaattttagttttattttatatttgtattttatgtatttgtttgtaaaaagtatatttgtttttaatattattgtaatgtttagtttagttttaaagtagtatataaaaataaataatttaagtttttatatattttattgtttttaagtttttatagaataggtgtgtaaatttaaggttttttattttaaataaatttttatgtacgaattaattaaaaatgtttaagttagtaaatacgtaaaatgtattaaagagaaatttcgaataatgtttttaaaaaataaattttggaatttttataattaaattaagttgttgtatttttttttttatttgtatatattaaagatttttaataatagatttcgtatttggtataaggatattttaaagaaataaataaaaaaaaagagagagagagaaaggtaaagaggtttacgttgatttgagtgtaagtttagtttattttttcgatggtgggtttttcggaggtttttgaatcgtcgtcgtcgttgtcgtcgttaggattattttggtaaagtttgttgatgatggggttgtaaattttttcgagttttttttgtttgtgtttatatttatttttttttgttatttggtttcggtcgagttagttgattattttttgatatttgtcgaggattttgtttttgttttgttcgttaattttgttttttagtttttcgttttttatcgtttgtttgatgttgtaggtataggattttagggcgtttttggtcgcgattcggtcgcgattcgttttatttttcgatttgtatcgtttcgttttttgtattattcggttaatgtcgtttttgtttagacgatttttgttattggtgatggtgattttgttttttttatcggtgtttttgtcggcggcggtaacgttaaggatgttattggcgttaatgtcgaaggtaatttcgatttgggggatttcgcgaggcgtagggggaatttcggttaggtcgaatttgtttagtaggttattgtttttggttatggttcgttcgttttcgtatatttgtattagtacgttgttttggttgttcgagtaggtggtgaaggtttgcgtttgtttggtggggatcgtggtgttttttttgatgagtggggttatgatatcgttagttgtttcgatgtttagcgataacggggttacgtcgagtagtagtaggttttgtatattttttgatttgtcgtcgatgaggatggtcgtttgtatcgcggcgttataggttatcgtttcgtcggggttgatgtttttgtttagttttttgtcgttgaagaaattttgtagtagtttttggattttggggatacgagtggagtcgtttattagtacgattttttggatttggtttttgtttagtttggcgtcgcgtagcgttttttttatcggttttagggtttcgcgaaagaggtcggtattgagtttttcgaagcgggcgcgcgtgatggacgtatagaagtttacgttttcgtagagcgagtcgatttcgatgttcgtttgcgtggacgagtttagggtgcgtttggcgcgttcgtaagcggtgcgcgatcgttttacggcgcgtttgttgggtttaatgttttttttgtgtttgcgtttgaattttttcgttaggtggtttattatgcggttgtcgaagtttttatcgtttaggtgggtgtcgtcggtcgtggattttatttcgaagatgttattttcgatggttaggatggatacgtcgaaagtgttatcgtttaggttaaagatgagtacgtttttttcgtcgttcgcgtagttttttttgtttaggtcgtaggcgatggtcgtcgtcgtgggttcgttgatgatgcgtagtatattgagtttcgtgatggtgtttgcgtttttggtggtttggcgttgcgagtcgttgaaataggtcgggatcgttatgatcgcgttgtgtattttgttttttaggtaggttttcgcgattttttttattttcgtgaggattatggaggatattttttttgggaagaaggttttggttttttttttgtattttatttgtattttgggtttgtttttttcgtttattattcggaacggttagtgttttatattcgattgtattgtggtattttcgaattttcgtttaattagttttttggcgtcgaagatggtgttggtggggtttatggttatttggtttttggcggcgtcgtcgatgaggcgttcggtgttcgtgaaggttacgtagttgggggtggtgcgattgttttggtcgttggcgatgatttttattttgttatgttggaagatttcgacgtacgaataggtggtgtttaggtcgatgtcgatagtcgggttacgggtagatattttgattgaaaggcgagcgacgttaggacgggaaaattagggagatgaatttcgcggagttaattaacggttatttcgaacgtattagaataaattatataagatttttatgtaagattattttttagtaatttattaggaattgtataaggaggtaaattggattttttttttgtttttatttttatttttttttttttgagatagagttttgtttttgttgtttaggttggagtgtagtggtgcgattttggtttattgtaatttttgtttttcgggtttaagcgatttttttgttttagtatttttagtagttgggattataggcgtttgttattacgtttaattttgtatttttagtagagatggggttttattatgttggttaggttggttttgaattattgattttaggtgatttatttattttagttttttaaagtgttgggattataggtgtgagttattgtattcggtttttttttaatttttaaataagttattttttggtaaatatagtatggtttttatagttattttttttttattttgatttttaatatgtttgtatatttaagagtgttgtgtttgttatataatttgttttttagtttgatggtgttttgtgtagattgagatatgaggattatgggattagtgtttagaattttgtaagttttttggaaatatagtatatttttttgttttagttagtagaatgtttgtgagttttgtgttgaagtttgggggttgagtggtagatattgtgtttttatttgatatttgatttgttgtttgaggatagagatgtagtgttatgggtgggagttgtgttttgttttattagtgtttagattttttaaaagataatggattttattttttgaaagaataggagatgaaaattaatgtttttttgtttttgtttttttttttttttatagttttttatttggtatatagtagaaaattttttggttatatttggtgtattttgttggtggaattttttaagaatgtatttttgattttttttttttttttttttttgagatagagttttgttgtattatttaggttggagtatagtgacgtgattatggttttttgtagttttaatttttttgttaaggtattttttttttttagttttttattttttggttttgttttaatagttgggattataggtttatgttattatacgtagttattttgtgtgtgtgtgtgtgtgtgtgtgtgtgtgtgtgtgtgtgtgtgtgtgtgtgtgtgtagagatggtgtttttttgtgttgtttggattgtttataaaatttgatatttaatagttttttgtttttatttattgagaaattggttttatttttttattgaaatgggagaagtgttatttattttattgtttttttaattaattaatttttttttttttgagatggagtttcgttttgttgtttaggttggagtgttgtggcgcgattttagtttattgtaagttttgttttttgggtttattttattttttttttgttttagtttttcgattagttgggattataagcgtttgttattacgtttggttagttgttgtgtttttttggtttgtttgtttgtttttgtttttttgttttttggggttttttttttgtatttttagtagaaatggggttttatcgtgttagttaggatggtttcgattttttgattttatgatttattcgttttagttttttaaagtgttgggatttataggtatgagttattgcgtttagtttaaattaattgatttttttgagatagagttttgtttttgttgtttaggttggagtgtaatggtacgatttgggtttattgtaattattgttttttgggtttaagtaatttttttgttttagcgtttcgagaagttgaaattacgggtgtttgttattatgtttagttaatttttttgtgtttttagtagagatagggttttattatgttggtttagttggtttcgaatttttgattttagatgatttatttgttttaggttgggattataggcgtgagttattatattgggtttttatgggattattttaagttaatatttaggaatttaaattataattagtattacgtagttacgtttaagaaagtatttttggggtcgggtacggtggtttatatgtgtaattttagtattttgggaggttaaagtaggtagtttatttgagtttaggagtttaagatcgatttgtgtaatatggtgaaattttgtttttatgaaaaaagtaaaaattagtcggatatggtggtatatgtttgtggttttaattgtttgggaggttgaggtgggaggattttttgaatttgggaggtagaggttgtaatgagttgagatcgcggtattatattttagtttgggtgatagagcgagattttgttttaaaaaaaaaaaaaaaaaaaagaatttt

SEQ ID NO: 47 - DNA, 7040 bp, Artificial Sequence
  chemically treated genomic DNA (Homo sapiens)
atatagtttggtttgagggaagatgttagtatgtgattataaattggataaaattatttaagatagtcgtattttaattagattaaattttaaaattttaaatatttataagtattttatgtttttaaaaatatgagaaatttgtaagatattattaaatttaaaggtttttaaaattagtttgaaatatatttgtatgttttaaaattttttgtgaagtttagttgtatttagataagtaaaattttatttacgtatttttagagttaaaatataaaatttaagcgattagggtaaagtggaagtaattaattttaattttttcgtatggaaatagatagtgtgcgttggttatatttagggacgtgttttatgtaatttataaattaagatttgtttcgattatattatatggattatataaaaattaaagtagttgtatatgtattttattgatatagaaataagtttatgttatattgttaagtataaaatttaaattttagaatgttaatagtataattttattgaagtaaaaaaaaattgatatgttttttaagtttgagtttataatttttgtatgggaatttttagtaaagcgtatatatttatttatagtttaattttttagttttaaaaaaggtaaaagtgaaatttcgataatgaaatttacggttgtaattagtaatattatatttgtacggttgtaatattcgcgtttttcgtattgtaatttttggaatttattgtaatttttcgaattcgttgttattcgagattttttaatttggcggttttttgttaggattcgggcggtcgttaagagtgcgtaggcgtaagcgcggtcgtcgtcggtggggttttatgtgttgttgagattgttgttgagtttttgggtttttttaagattgttttttaaaagacgacgtgatgattttaaagagaaaggaaaatttgttgcgtacgtagaagggtaggttgggcgtattttgagcgtttttcggggatcgacggtttcgtttacgtgttttcgggtattagcgcgtttaaagttcgtgtattaggaaacgtataaaagtattagcgggcgagttcgagggcgagtttacgggtagttaggaggcggcgagggcggtttgttttttagagattggggaattaagaaaggtagagttattttttcggttttagcgtagtaagtgtaggaggtagggagggcgtagcgtttcgtcgtttacggtattcgtggaattcggtgcgcgtttcgggagttggggcggtttaggtttagcgtgtttagaaagttaattacgttggttaggaggacgtttttttattattcgcgatttttaggttttgattaaagttaaattaaaaggagttattcgtttcggtatttgttgttatttttgtgataaatatggtgtttgatacgaaagtattttaatagttatgttgttaattaaagaataaaatacgtaaagtttgtgcgttaagaatacgagagtatttcgttttttaggaggtgtagtttattttgttttttttgttttatatataattttaaggagaattttttgttattaatatattttgttttttgtttttgggggatgatataggtatattgtatttgattagattagtgttaattttttatttacgtttttattatatgttgtattattaatatagtaggattttatatttttaatcgtaaaatttaagagtagaaaaatatttaaattgtatgttagtttaatatgaaaacgagttattttagttttgataggatatttttaaattaatattatttaataaatatgttttttattcgtataagtttatatatatggttttttaaatgagttttataaataataattagtattgaggttttgatttaagtatttgaaattttgttattttttataataattttgagatgggtatattttttttattttgtagataaggaaataggtattgggatggtaagaaatttaggttatttggtttttaatagttttttattattatgttaaagttttatttatttttgagatttaaaatattatatagtgtatatatatttggtaattaaattaggattaaatattaaagttaagggttaagtatagtgttttgtaattttagtattttgggaagttgaggcgggtagatcgtttgattttaggagtttaagattagtttggaaaatatggtgaaattttattttaataaaaaaatataaaaatagttgggtgtggtggtgtgtgtttgtggttttagttatttgggaggttgaggtgggaggatcgtttgagttaaggaggtagaggttgtagtgaattaagattatattattgtattttagtttgggtgatatagtgagacgttgttttaaaaagaaaaaagtaaaattaaagtaagaatataataagaaatatgtttggtattgtgttacggggagaaaaaattaatagggagataaattttgtttttagggtaagtgtaatttgttgagtaaaagaaatattttaagatattttaaaaaagaaaataaaggttgttgtaaattggatatttaattaaatatttttgggtagattggtagatgatagatttaatgaatttggggtttataaatatatagaatgttatatttttattaatattttatgttttgggtaaagagtaaaattaattttgaaaatgaattgtgtatgtaattattttaaaaataaagattatataataagttatattattttgtattatgtgtaatatttagggggttaaggtatttttattttgttaatatttatagtatttttattatataattattttagagttttgaattataattttaattaggtgatagttattgagtaaattttgtaatgtaaatttattatagaatataattgtattattttttttttatttattggtatttttttatatttggggtttgatataattgtatataataatttttttattaaaatattttatagagttggttaggtatggtggtttacgtttgtaattttagtattttgggaggttgaggtaggtggattatttggggttaggagtttgagattagtttggttaatatggtgaaattttatttttattaaaaatataaaagttagttgggtatggtggtatgcgtttgtaattttagttattcgggaggttgaggcgggagaatcgtttgaatttaggtggcggaggttgtagtgagcggagatcgtgttattgtattttagtttgggtaataagagcgaaattttgttttaaaaaaaaaaaaaagattgaggtttaagtaggttaaatattatatatatattagattatatattaagttatataggttgtatagaatagaaattttattttagggttttatagattttaaattgtttttgtaaatggtttatgtttattaatttatttttttaaagttaatatattttaaaaatagaattgttattattaaaatgtggttatatataatttaatatataagtgttttagaagaagggaattttattatttgattttttaaaatatagattttaatatttttgtgtgtgtgtgtttttttatgaatatggtaatattattggttttttttttaaagatatggtatgaaattaattttttgtttagagttaggattttgttttattatttagtttggtgtgtagtggtacgattatagtttattatagttttaaattttttagtttaagttttttttcgttttagtttttaaagtagttaggattataggagtgtattattatatttagttaattttattattattttttgtagaggtaggttttaaatttttggttttaagtggtttttttattttagttttttaaagtattggtattataggtataatttattgtatttggtagaaaattaatttttattataaaaattagaaagaaagattttattgtttgatggttaatattttgaattttattttaatttttggttttttatattatatgtaggtattagtgattttgtgttatttttatttttttagatttttttttttttataatttttttatatgtgttattatttgaagttttgattatagttttgaattatttttatttttttgttttttttaattttggtttaaaatttcggtaatttatttgttacgaagtttagaattttttttgtaagtgagttgatcggttgggttaaatcgttttggaagggaaggattgttaggaagttagtatgttgttaagatgttttgttaatttgttgtgtaagttgtatagagtgttaggggatttttttttttattgatgaatttaggtgtgtgttatgatttgtattagtgattttatttggattgattaaggttgtaattttttatttatatgaatgttgtatttagtttttttttgtaattggttaaataaatgtttgttgtttgtattttaatttttagttaatatttgttggaagtgatttaatgtagttggagaatgatattaataattattatagtttgtaaagtgtgaaataattttattgtgttttgtggtttttttagtttgaggattgataatgtgtagcggatgagatttgaaaaaaacgtattttattataatttaagaaataatgtaaaagaggggtgagttttgaggtagttttatgttgtttgtttggtatgagtttgtttttataagaatttattttaagtgtggaagggaaatgtttttatttgaaagggatagttgtgttttatttcggtttttttttttatttgataaaaatttttgttgagtgatagtatagatgtagtttatttggaataagtgaaggaaaaggagaaaagggatgaggtggagcgaaggagtagttagttatgtttttaaagtttcgcggttttttttagtttttttatttaatttagcggttttggtgtttttttgtaaagtgagatgttttcgtttttggttttacgtttttattttcggagcgagttttttttatcggtggacgcgcggttttgtagtagttttttagagttatttgcgaagttgtttttgggggttatttttttcgggtttcgcggttgtcgcgtcggttggtttggtgttttattgattgggagtaggtgtgtttgttgtagaggttgggagttggagggtttggttcggtgtataaggcgatttatcgcggtgtttttgtggttataaagtaagtgaataagtgtattaagaatcgattagtatttcggcggagtttttgggttgagtttaacgtagtaaggttgcgttacgataatatcgtgcgcgtggtggttgttagtacgcgtacgttcgtagggtttaatagtttagggattattattatggagttcggtggtaacgttattttatattaagttatttatggcgtcgtcggttattttgagggggacgtaggggagttttattgtcgtattggaggatagttaagtttgggaaagtgttttaagtatttattagatgttgtgaacggtttgttttttttttattcgtaaagtattgtgtatttggatttgaagttcgcgaatattttgattagtgagtaggatgtttgtaaaattagtgatttcggttgttttgagaagttggaagatttgttgtgtttttagatatttttttattttttaggaggtatatatatttatcgcgtttcggagtttttgaaaggagagggcgtgacgtttaaagtcgatatttatttttttgttattattttttggtaaatgattattaagtaggcgtcgtattcgggggagcggtagtatatattgtacgcggtggtggtttacgatttgcgttcgttttttttcgttgtcgttttcgaggattcgtttttcgggtagcgttttggggacgttatttagcgttgttggagatttagcgcggcgtagaggtcgagcgcgcggttgtttttggtggattttatttttttgaaagttgaattcggttgattgaaaatttggttaagataagtttttgtttgattttatttgtttttaaaggaagtggagatgtcgaagaaaatatatttgtaggatggagttttagaaaataaagttattaaaaatttttttagtttttagtgttttttttaggatatattagtaaagttataagtttagtatttgttgttttagtattgttagtaattaattttatttatatagttatgtgttttgttttttattgttagtattttatttatttaaatttgttattgataaaagtttgtttaaaatagaattttattgtagaaatgttaaaattttttataaatttatatatattttatatttattatataaattttaattattaatggtgtagttgtttttatattaaattagtaaaaatttttaaaaaaataagtaatgtttttttattattttttttagtaaaattttttgtttgtaatgatttttatttataaaagttatatattgaggtatatttatatttaaaggaattatattataaatgatttattgtaatatttttaatttgtgtattgtaatgagtagaaatattttgttaaaatatttttaaattgggttatttttatttggtattgggatttagaagtagaagataaagattatatgatgtgagaggaaaatgtaggagtagaaggtaaagattatatgatgttaggaattatgaaatttaatatttggatggaagagaatagataaatagaattagattgtttattttagatattaaaataatggatgttggtatataggatttaaaggagaaggtgattggattttgttattgggatagttttgatttttttttagtaatagtagtttttgtgtatggtggaaagtaaggttgatgtaatggttggtagagggaatggtaaggttttgaagtagaggttgtgtatgtattgttaaggagggagaggtaggaagtttaaaagggggttagagatatagaaatgtt

SEQ ID NO: 48 - DNA, 7040 bp, Artificial Sequence
  chemically treated genomic DNA (Homo sapiens)
aatatttttgtgtttttgatttttttttaagttttttgtttttttttttttaatagtgtatgtatagtttttgttttagggttttgttattttttttgttagttattgtattagttttgttttttattatgtatagaaattgttattgttaaaagaaagttaaagttgttttaatgataaaatttaattatttttttttttaaattttatgtattaatatttattgttttgatgtttagagtgggtaatttagttttatttgtttgtttttttttatttaaatgttaaattttatgatttttgatattatataatttttattttttatttttatattttttttttatattatataatttttattttttatttttgagttttaatattaggtaaaaatgatttagtttagaagtgttttagtaaaatgtttttatttattgtaatgtataagttaaagatattataataagttatttatgatataatttttttgaatgtaaatgtattttagtgtatgatttttatgagtgaaggttattataaataagaagttttattggggggagtagtaggaaagtattatttatttttttaaaagtttttattgatttggtgtgggagtaattatattattaatagttggaatttatgtggtaggtatgggatatatatggatttatagaaaattttgatatttttgtagtggagttttattttggataaatttttattaataataaatttaaataaatgaaatattagtaatggaaagtaaagtatatgattatatgaataagattagttattaatagtattgagataataggtattagatttgtagttttgttaatgtgttttagaaaaagtattggagattaaaggagtttttagtaattttattttttaaaattttattttataaatatgtttttttcgatatttttattttttttaaaaataaatagaattagataaaaatttattttgattaggtttttagttagtcgagtttagtttttaaagaggtgagatttattaaaagtagtcgcgcgttcggtttttgcgtcgcgttgggtttttagtagcgttggatgacgtttttaaggcgttgttcggggagcgagttttcgaaaacggtagcggagagggacgggcgtaggtcgtaggttattatcgcgtatagtatgtgttgtcgttttttcgaatacggcgtttgtttggtagttatttgttagagagtgatggtaaaggaataaatgtcggttttaggcgttacgttttttttttttaggagtttcggggcgcggtgggtgtatgtgttttttagagggtaagagggtgtttggaagtatagtagattttttaattttttagagtaatcgaagttattaattttatagatattttgtttattgattaagatgttcgcgggttttaggtttaagtgtataatgttttgcgagtggaggaagagtaggtcgtttataatatttagtgagtatttgagatatttttttaaatttaattgttttttagtgcggtagtgaggtttttttgcgttttttttagggtggtcggcggcgttatagatgatttggtgtaaagtgacgttgttatcgaattttatgatgatggtttttaggttattggattttgcgggcgtgcgcgtgttggtagttattacgcgtacgatgttatcgtggcgtagttttgttacgttgagtttagtttagaaatttcgtcgagatgttagtcggtttttggtgtatttgtttatttgttttatggttataggaatatcgcggtaagtcgttttgtatatcgagttaaattttttagtttttagtttttgtagtaagtatatttgtttttagttaatggagtattaggttagtcggcgcggtagtcgcggggttcgaggaagatggtttttagaagtagtttcgtaggtagttttgagggattgttgtagggtcgcgcgtttatcgatggggaaaattcgtttcggaggtaggggcgtagggttaggggcgagggtattttattttgtagggggatattagggtcgttggattgaatgaagagattaggggaaatcgcgggattttggaaatatgattgattattttttcgttttattttatttttttttttttttttttttatttgttttaaatgagttatatttgtgttgttatttagtaagagtttttattagatggagggagaaatcggaatgaagtatagttattttttttagatgaaagtattttttttttatatttgaagtgaatttttataaaaataagtttatgttagataaatagtatggagttgttttagaatttattttttttttatattattttttaaattataataaaatacgttttttttaagttttattcgttgtatattattagtttttagattaaagagattataaagtataatgaaattgttttatattttgtaggttgtaatgattgttagtgttattttttagttgtattaaattatttttagtaggtattggttaagagttaaaatgtaaatagtagatatttgtttaattaattatagggaaaaattaggtgtaatatttatatggataaaaaattgtaattttaattaatttaaatagaattattgatataggttataatatatatttaaatttattagtggaaaggagaattttttgatattttatgtagtttatatagtaaattagtaagatattttagtaatatattgattttttaataattttttttttttaaggcgatttggtttaatcggttagtttatttgtaagagagattttagatttcgtagtaaatgagttatcgaagttttgaattagagttgggggagataaaagaatagaaatgatttagagttgtgattagggttttaaataataatatatatgggagaattgtagaagaggaaaaatttgaagaaataaaaatggtataaaattattggtatttatatataatgtagaaaattagaagttggaatgaaatttagggtattggttattagataataagatttttttttttgatttttataatgaaaattaattttttattaagtgtagtgagttatgtttataatattagtgttttgggaggttaaggtggaagggttatttgaggttaagaatttgagatttgtttttataaaaaataataataaagttagttgagtgtggtggtgtatttttatagttttagttattttggaggttggggcgggaggagatttgaattgaggagtttgaggttatagtgagttatgatcgtgttattgtatattaggttggatgatggagtaagattttgattttaagtaaaaaattaattttatattatatttttggaaaaaggattaataatattattatatttatgagaaaatatatatatataaaagtgttaggatttatattttaaaaaattaaatggtaaagttttttttttttaaagtatttatgtgttaggttatgtgtaattatattttaatgatagtagttttgtttttgaagtatattgattttgagaaggtaaattaataaatatgaattatttatagaaataatttgaggtttgtgaagttttggaataggatttttattttatataatttgtgtggtttagtatgtgatttagtgtgtgtataatatttaatttgtttgagttttaattttttttttttttttgagatagagtttcgtttttgttgtttaggttggagtgtaatggtacgattttcgtttattgtaattttcgttatttgggtttaagcgattttttcgttttagtttttcgagtagttgggattataggcgtatgttattatgtttagttaatttttgtatttttagtagagatggggttttattatgttggttaggttggttttaaatttttgattttaggtgatttatttgttttagttttttaaagtgttaggattataggcgtgagttattatgtttggttaattttatggaatattttagtagaaagattgttgtgtgtaattgtgttaaattttaaatataaaaggatgttaatgaatagagaaaaagtaatataattatattttataataaatttatattgtaaaatttatttagtaattgttatttagttaggattataatttagggttttgaaatggttatataataggagtgttgtgaatattagtagaatgagagtgttttaattttttagatattatatataatgtaagataatgtgatttattatataatttttatttttaagataattgtatatataatttatttttaaagttggttttattttttatttaaaatataaggtattagtgaaaatgtggtattttgtgtatttataaattttaagtttattagatttattatttgttaatttgtttaagaatatttaattgaatatttaatttataatagtttttgtttttttttttaaggtattttaaaatattttttttatttagtaaattgtatttattttgaaagtaggatttatttttttattgatttttttttttcgtaatatagtgttaaatatattttttattatgtttttattttaattttgtttttttttttttgagatagcgttttattatgttatttaggttggagtgtagtggtgtgattttggtttattgtaatttttgtttttttggtttaagcgatttttttattttagttttttaagtagttgggattataggtatatattattatatttaattatttttgtatttttttgttgagatggggttttattatgttttttaggttggttttgaatttttgaggttaagcgatttgttcgttttagttttttaaaatgttaggattatagggtattgtgtttggtttttaattttaatgtttaattttgatttggttattaaatatgtgtgtattatgtaatattttggattttaaaaatgggtaaagttttagtatggtggtaaaaggttattaggggttagatggtttgggttttttattattttagtgtttgtttttttatttgtaaaatgaggaaaatatgtttattttaggattgttgtgaagagtaatagagttttaaatatttagattagggttttaatgttaattattatttataaaatttatttaaaaaattatgtgtatgggtttatacgaataagaaatatatttgttaggtagtattggtttaaaagtattttattagggttgaaataattcgtttttatgttaaattaatatataatttgagtatttttttgtttttgaattttgcggttaaaggtataaaattttgttgtattaatggtatagtatgtagtaaaaacgtgggtggaaggttaatattaatttgattaaatgtaatatgtttatgttattttttaaaggtaaagagtaaaatgtgttgataataaggaattttttttggaattatatatgaaataaaggagataagataaattgtattttttgaggagcgaaatgttttcgtgtttttagcgtataggttttacgtgttttgttttttgattggtagtatgattattaagatattttcgtattaaatattatatttattataagagtaataatagatatcggaacggatagttttttttaatttgattttaattagagtttgaggatcgcggatagtgggagaacgtttttttgattaacgtggttggttttttgggtacgttgggtttgagtcgttttagttttcggggcgcgtatcgggttttacgggtatcgtggacggcggggcgttgcgttttttttgttttttgtatttgttgcgttggggtcgaggaggtggttttgttttttttgattttttagtttttggaagataagtcgttttcgtcgttttttggttattcgtgggttcgttttcgggttcgttcgttggtgtttttgtgcgttttttagtgtacgggttttgggcgcgttggtgttcggaagtacgtgggcgaggtcgtcggttttcgaaagacgtttagagtgcgtttagtttgtttttttgcgtacgtaataaatttttttttttttttagagttattacgtcgttttttggaaggtagttttaaaaaggtttagaagtttaatagtagttttaatagtatataaaattttatcgacggcggtcgcgtttgcgtttgcgtatttttgacggtcgttcgagttttggtaggggatcgttaggttaagagatttcgggtgatagcggattcgagaggttatagtggattttagaggttatagtgcgaagagcgcgagtattgtaatcgtgtaagtgtggtattgttggttataatcgtggattttattgtcgaaattttatttttgttttttttaagattaaaaagttaagttgtagatgaatatatacgttttattaaaaatttttatataaagattatagatttaaatttgaaaaatatattaatttttttttattttagtgggattatattattgatattttaaaatttgaattttatatttagtaatataatatagatttgtttttatgttagtaaagtatatatatagttattttaatttttatatggtttatataatatggtcggggtagattttagtttgtggattgtatggagtacgtttttggatgtgattagcgtatattatttgtttttatgcggggaggttggggttggttgtttttattttgttttgatcgtttgggttttgtattttgattttggagatacgtaaataaaattttatttgtttaaatatagttaaattttataaaaggttttaagatatataaatgtgttttaaattggttttggaaatttttgaatttaatgatattttgtaagttttttatgtttttaagaatataaaatgtttatagatatttgaaattttgaaatttgatttgattaaaatgcggttgttttgaatgattttgtttaatttatgattatatattggtatttttttttaagttagattatgt

SEQ ID NO: 49 - DNA, 6246 bp, Artificial Sequence
  chemically treated genomic DNA (Homo sapiens)
ttttgtatatttgtattttatataataatattttgtgtaatttttttttaaatgtagaatattgatattggagaatgttttttatatattttaagtgaaaaaggagtaaaaattatataatgtattattttatttttttaataaaatgtaaatgtgtatagtaaagatatagaggtgttatagtgttagggaaaaggggtgtaagattagtgtttgttttttattttttgttttgtttataaattttttatattaaaaatataaattttaaatgaaaataatggaataaatataaatttttattttataattaattaaaatgatagtaattgaattttttaaagttttaaatttattaaaatgggagaaatggatgatagtattagcgtttgaaaggtggaaagtggagggacggtgggtagattatttggttgatttaagaaaattgaattttaggttagttgagatttatgttgatttatagaattttaagaatgtttaggaattgggagaagattaaggatattagaagagaagggggtgaaaataaggaaagttgttgaaatttagtttaagaaatagttagatatttatttttgtttattaaagtcgagtgatttttttgtagtagggtttttttcggataggatatttggattaagaaatattagatatagtagagggcggtcgaaatatgttgaaattaggaatagttaatagatgttgaggtttttattttagttttttttttatttttgttgttggaatgttggagatagggagaattttttttgcgcgagttgatttgtttgttaaaaaaacgataaagaaattgttataggaggttttttaagtgaaaatagttagttatttgttttataggaaatagtttttttttatataattatttttagagatttttgttttaatatgtgtaggtaatttaggattatttaacgtgtaaggaaagtttataagatggaaaaaaaattttttttgaggtagggtttggttttgttatttaggttggagtgaagtggtgtgattataatttattgtagtttcgatttttgagtttaagtgatgtttttatatagttttttaagtagttgggattataggtatgtataattatgtttggttaagttttttttatgttttgtagaagtaaagtttttttatgttttttaggttggtgttaaatttttgggtttaagcgatcggttttttaaagtgttggaattataggggtgagttatcgcgtttagtttaaaataattttttaaagaaaatttgtagaaaataaagattatgtatgaaaaaggaaatttagaagatattaatgaaataagaatatagtgttgttagcgtgtatgtgtatatgcgtatatatatataaagaattaaatatttttaggaagataaagttatgagaatattttagagaagagaaattttttaaatggaaaatagaataaaaagaaaattaaaggataagtttaagaggtatatagttaaaaaaaatggtagttttaataagagagaataaagaagaaaagttataaaatgttttaatttaagtgtgaatataaaaatatattatttttatagtaagtgagaaaaatagggtgtaaaaggtgtatatgatgttattttatatgtagggataagggaaaataagattatatatttatagttgtttgtatttatataaattaataggatattaaaaaaaaaaaaaaataatatttaagaaaaatagttatttgtgagggaaggtggagattttattgaattttttatatatatagttgatttttgaatagtaggttttgaattgtatagatttatttatttacggatttttttttgtttttgttatttttgagatgataagatcgattttttttttttttttttttcggtttgtttaacgtgaagatagtgacgttgaagatttttgtgatgttttatttttatttaatgaataggaaatatatttttttttttttttttgtgatttttttaataatttttttttttttttttttttttttttaagacggagttttatattgtcgtttaggtttaagtgtagtggcgcgatttcggtttattgtaagtttcgtttttcgggtttacgttatttttttgttttagttttttgggtagttgggattataggcgtttattattacgttcggttaatttttttgtatttttagtagagacggggttttatcgtgttagttaggatggttttaattttttgatttcgtgattcgtttatttcggttttttaaagtgttgggattataggcgtgagttatcgcgttcggtttataaataatttttaaaagatagtaagggatatagtagggtagtaagtgttttatttataagaggagtagtaatgttagaggtttatagagtacggatttttagcgttgtcgttttatataattagtttttttgatttttaaaattatttgtattcgtaatttttttaaaaataaaaatttaaaaaattaaatttttttatttataaaaataatttttttaggttttattttttttgattgggtattatgtttttgttaacggagatttagagtttagagaaattcgaaaaagtaattttagtttttttaggatgagttggtcgggaggaagggaggttttaattttagcgtttcggggttagagtaaagcgaagaggttttttatggttataagcgggcggtttacgtagcgtattgtaggtaggtgcgagttatatgcgttaagtgttcggagcggttttttggtagttagtgttaattaaaattattcgtacgggagtggattttcgttgataatttagaaataagtaatagattttttgatgtagttatttgtgtcgcgttttttcgtatcgttcgttacgttttggtttttggagattattttttagggtaggggttgtcgttcggtcgggttcgcggggtttttcggtttgatatggtcggtgttggagcggtacgtgcgcgtttcggtttttcggtcgttttcgtttttcgtcggtgcgtatcggcgttcggggagtcgttggttcgggtgtttagtcggtttttgttttgtttggcgttcggatcgttatttttgtcgttttttcgttagttttcgtagtttttagattggtcggtttgcgcgtttatttttgtttttcggatcggttatcgtcggaggtcgcggaggagggttcggtcgcgtagatttcgtttatcgggtttatttttcgttatataaggttatttttttattttcgcgggttatcgtcgtcgtaatcgtcgcgttagcgtttttttttacgcgcgggggcgtttttgtttatcgttttcggtagggtttttggtggttatgggggataaggggcgttgatttattcgggcggggtttcgggagttgtatagattaaggtagtttttcgtttttttttttattacggagattttgtgggagatgtcgtgggttttttattatagattaggaaataggttcgtagaggggttatacggttaagtagcggtattttaggtattgggggttttcgaggggaaggggtagatttttgggagttagagttagtagttgggttgggaagtttcgagtgtggatagagagggtgggaatgacgttttttgtgggaagagagggtgggtaagtttgggatgtttttgagcgggaatttagtatgttttgtgaggagggttataagtatatttttgtgaggaggttgagttttatcgaggataggacggagggagtttgagtaggtagagagggggtttggggaggcgttggttcggggaggaagtgggtaggggagaaattttgatattaatatttaataggtaaatgtcgtggtttttgttgtgggggtttttggaggatttttaggaaaacgagggaagagtaggaaaaggcgatatggttgtaggggttaagtttaggagtcgttttttatagtatttattttgtagaagggaaatttgaggtttttagacggtaggggttgattttgtagagattggtgagtaaaggggattattttaagttttagtggtattaggaatatttataatttttgatttggattaaggttgttagtttggtttagttaagagttttttagaaggatggtttatatattttaaattaaaggggttagatacgtgtatattatttttagttattttggaagttgaggtggggggatcgtttgagtttgggagttggaggttagtttaggtaggtaatatagtgagattttatttttaaaaaaataaaataaaataaaataaaaaaatattaaaaaagtttttagaaagatttttgaatttttttggattttttagtggagatttggaaatttgaattttgataattttttttatagtggggttaaggaggaattaggtaagttaaaagaagtgaattttatttttttattgtttgtttgaattttgtatttaagtaagtgttatttaagtaatttaagagattggtttatcgaaaaaataaaattttttaaatttttatagttggtagattgtggttatagttatagtgtattaagattatttgtttagtatttttggtgatttaaaagggtttgaggataggagtttagagttgggttagttgtttaggtatttagggttgttataggtaaaattgttggaatttagggtagtattgtaaatgttacgtcgtttttagggttttttgtttgtcgttggaattaaatttatttagattttggaaattttgttttggattttttttaataagtttatgagaaattaaatttttttttttatgcgatattggattttttataaagtaaaattaagatgagtaaagatgtggtttttagatagtgtttgaaaaagtagagattatggtgttaggcgttattatttgggtttataaaagttgttataagacgttaaggttataagttatttagtttatgtattcgttttttaatttttttttgttggtattgggttttatggcgtttttgttgattacggttattgtttttatttgttttggcggttttgtttttttaggttttgtgtttttttttatagtttttagggagtttattgaggagttggttaatattatttagaattagaaggtgagtgtcggttagttagggttttagttatgagggttttagggtgggtgatttttaagatgaggttatgagtaggttgggtttggttttaagatgtttgtaggttaggaaaaatttttatggattaaggttcggtttagttatgagggagagaggagttgggttggggggtttagtattgtggatggatttatggaggtgtttggtagattttttagggattatttgtttttttggtttggttttgtttgttattgttagtttttatttagttatttttgaatagaggatagtagagaagggttagtatttttttagaattatgtggtatttgttaattggattttgattataataatgtagttattttttttagtattattataggttcgtttttataggaggattttttagtagagttcgttttttgttttattagtaatagtttatatgtttgagtattgtttatattaggtttggtgtacgtgttttatgtgttattttattattgttagttattttaagaggtaggtacgatgaatttattttgttaaggtttagtgaggttaagtgatagaggttggatttaagttaggtttggttaatattagagtgtttatgtttttaattgtagtgtttttttattattagaaggtagggtatttaatatattagatttttatcgttttttatttgatttgttttggttaatagtggtttaggttatttttattttattcgtttttattttggtttttttcgtaggtttttgtttttttgttttgattatggtaagttttgtatgtagtttgttttttattagtggtgttaattttttttttttagttttaagattttaaatagtgggattttatttttatgtttgttgtttaaagtagaaaacgaagtttaggaatgttgaggggttgttaggtttgtttttgtgttatattagggatgtttgtggggtttgtgttggggtagatttggtttgggttgttagggtaggtttataatttttgttagtattttgtttattgttattttgtttttatagg

SEQ ID NO: 50 - DNA, 6246 bp, Artificial Sequence
  chemically treated genomic DNA (Homo sapiens)
tttgtgggagtaaagtgatagtgagtagagtgttggtaggggttgtgggtttgttttggtagtttaggttaggtttgttttagtataggttttataagtatttttggtgtggtatagaggtaggtttggtagttttttagtatttttgagtttcgttttttgttttgaatagtaggtataggggtgaggttttattgtttagggttttggagttgagagaaaaaaattgatattattagtaagggataagttgtatgtaaggtttgttatagttagggtaggaggataggggtttgcgggaagggttagggtggggacgagtgaagtaggagtggtttgggttattgttgattaagataaattagatgggaggcggtggggatttggtgtattaaatgttttgttttttgatggtgagggaatattgtagttaggagtatggatattttggtgttggttaggtttggtttgaatttagtttttgttatttaattttattgaattttagtagaatgggtttatcgtatttgttttttgaggtggttggtagtgatgaaatgatatataaagtacgtgtattaggtttggtgtaagtagtgtttagatatgtgagttgttattagtggggtaaggagcggattttattaaggaatttttttgtaagggcgggtttatgatggtgttggggagaatggttgtattgttatggttaaaatttagttggtaaatgttatatggttttgggagggtgttggtttttttttgttgttttttgtttaggaatggttgagtaggagttggtagtggtagataaggttaggttaggagagtaggtagtttttggggagtttgttagatatttttataggtttatttatagtgttgagttttttagtttagttttttttttttttatggttgggtcgggttttggtttatggagattttttttgatttataggtattttaggattaggtttagtttgtttatgattttattttgggaattatttattttggagtttttatagttaggattttggttagtcgatatttattttttggttttgggtgatgttgattagttttttaatgagttttttgagggttgtagagggaggtatagggtttggggaggtaaagtcgttaaggtaagtgagagtaatgatcgtggttaataaaagcgttatgaggtttagtgttaataggagaggattgaggagcggatgtataggttgggtggtttgtggttttggcgttttgtggtagtttttataggtttaagtggtgacgtttgatattatggtttttgtttttttaggtattatttagaaattatatttttatttattttgattttattttgtggaaaatttagtgtcgtataaaggaaagagtttgattttttatggatttattgagaagggtttagggtagagtttttaagatttgggtgggtttaattttagcggtaggtaaggggttttgagagcggcgtggtatttgtaatgttgttttgagttttagtagttttgtttgtgataattttgagtatttggatagttgatttaattttgagtttttgtttttagatttttttgggttattagaagtgttgagtagatagttttagtgtattgtggttgtgattatagtttattagttatgggaatttggggagttttattttttcgatgaattagttttttaaattatttaagtaatatttgtttggatataaaatttaaataggtaatagaagagtaaagtttattttttttggtttgtttaatttttttttggttttattgtgagagggattgttaaagtttagatttttaggtttttattgagagatttagaaagatttagaggtttttttgggagtttttttggtgtttttttgttttgttttgttttgtttttttggagatggggttttattatgttgtttgtttaggttggtttttaatttttagatttaagcgatttttttattttagtttttagagtggttggaagtagtgtgtacgtgtttggtttttttaatttaaagtgtatgggttatttttttgggaaatttttaattgggttaggttggtagttttagtttaggttagagattgtaagtgtttttagtgttattggggtttggggtgattttttttgtttattagtttttgtaggattaatttttgtcgtttgggggttttaaattttttttttgtagaatgagtgttgtggagggcggtttttgggtttggtttttgtagttatgtcgtttttttttgtttttttttcgtttttttagaagttttttagaaatttttatagtagaggttacggtatttgtttgttgggtgttgatgttaagattttttttttatttatttttttttcgaattagcgtttttttaggttttttttttgtttgtttaggtttttttcgttttgttttcgatggggtttaatttttttataagggtgtgtttgtgattttttttataaggtatgttggattttcgtttagaggtattttaggtttgtttattttttttttttatagggaacgttatttttattttttttgtttatattcgaagttttttagtttagttgttggttttgatttttagaagtttgtttttttttttcgagggtttttagtgtttggagtgtcgttatttggtcgtgtgatttttttacgggtttgttttttaatttgtagtagagggtttacggtattttttatagggttttcgtgatgggggaaggagcggggaattattttggtttgtgtaattttcggagtttcgttcgggtgagttaacgttttttattttttatggttattaaaagttttgtcgggagcggtgggtaggggcgttttcgcgcgtgggagaaggcgttggcgcggcggttgcggcggcgatggttcgcggagataggggggtggttttatgtaacgggagatgggttcgataagcgggatttgcgcggtcgggttttttttcgcggttttcggcggtggtcggttcgggaggtaggggtgggcgcgtagatcggttagtttggaagttgcggaggttggcgagggggcggtaaaggtggcggttcgagcgttaggtagggtaagggtcggttggatattcgggttagcggtttttcgagcgtcggtgcgtatcggcgaggggcgggagcggtcgaggggtcgaggcgcgtacgtgtcgttttagtatcggttatgttaggtcgagggatttcgcgggttcggtcgagcggtagtttttgttttggagggtggtttttagggattaaggcgtggcgggcggtgcggagaggcgcggtatagatggttatattagagggtttgttgtttgtttttagattgttagcggggatttattttcgtgcgggtaattttaattaatattaattattaaagggtcgtttcgggtatttggcgtatgtggttcgtatttgtttgtaatgcgttgcgtgggtcgttcgtttatggttatggggagttttttcgttttgttttggtttcgaagcgttgggattgggatttttttttttttcgattagtttattttgggaaagttggggttgttttttcgggtttttttggattttgggttttcgttggtaaagatatgatgtttagttaggaggagtaaggtttgagagagttgtttttgtaagtgaaaggatttaattttttagatttttatttttaggaaagttacgaatgtagataattttaaaaattaagaaggttgattatgtaaaacggtagcgttgggaattcgtgttttatgggtttttggtattgttgttttttttgtgagtgaggtatttattgttttgttgtgttttttattgttttttaaaggttgtttataggtcgggcgcggtggtttacgtttgtaattttagtattttgggaggtcgagatgggcggattacgaggttaggagattgagattattttggttaatacggtgaaatttcgtttttattaaaaatataaaaaaattagtcgggcgtggtggtgggcgtttgtagttttagttatttaggaggttgaggtaggagaatggcgtgaattcgggaggcggagtttgtagtgagtcgaaatcgcgttattgtatttaagtttgggcgatagtgtgagatttcgttttaaaaaaaaaaaaaaaaaaaaaaaaaggttgttaagaaaattataaggaaggaggaaaaaatatattttttatttattaagtggaggtggaatattataaaggtttttagcgttattgtttttacgttgagtaggtcgaggaggaagaagaggaggggtcggttttgttattttaggggtggtagaggtaggagagaattcgtggataagtggatttgtgtagtttagaatttgttgtttaagggttaattgtgtatgtaaaaaatttagtggaatttttatttttttttataagtaattattttttttaggtgttgtttttttttttttttggtattttattagtttatgtaaatataagtaattgtgaatatatggttttatttttttttgtttttatatgtgaagtggtattatatatattttttgtattttgttttttttatttattataaaaataatatatttttgtatttatatttagattgggatattttatgattttttttttttgtttttttttattggaattgttattttttttgattatatattttttggatttgttttttaattttttttttattttattttttatttaaaaaattttttttttttgggatatttttatagttttatttttttgagggtatttgattttttgtgtgtgtgtgcgtatgtgtatatgtacgttaatagtattatgtttttgttttattgatattttttaagtttttttttttatatataatttttattttttgtaagttttttttaaaaaattgttttgaattgggcgcggtggtttatttttgtaattttagtattttggggggtcgatcgtttgagtttaggagtttgatattagtttgggaaatatagggagattttatttttataaaatataaaaaaaatttagttaggtatggttgtgtatatttgtgattttagttatttgggaggttgtgtgggagtattatttgagtttaggagtcgaagttgtagtgagttgtgattatattattttattttagtttgggtgatagagttagattttgttttaaaaaaaattttttttttattttataggttttttttgtacgttaggtaattttggattgtttgtatatgttaaaatagggatttttgagggtaattgtgtgggagggggttgttttttatagggtaggtggttgattgtttttatttggggaattttttgtggtagtttttttgtcgtttttttggtaggtaggttagttcgcgtagaaaagattttttttgtttttagtattttagtagtaagggtggagagagggttggggtgggggttttagtatttgttgattgtttttgattttagtatatttcgatcgttttttattgtgtttagtgttttttggtttagatattttattcggagaaaattttgttgtaggagagttattcgattttgatgaataaaaatggatatttaattgttttttaaattgagttttaataattttttttatttttattttttttttttttgatgtttttggtttttttttagtttttgagtatttttgggattttgtaaattaatataggttttagttggtttaggatttagtttttttgggttagttaagtagtttgtttatcgtttttttattttttattttttaaacgttggtgttgttatttattttttttattttggtgggtttaaaattttagaaaatttagttattgttattttagttggttataaagtgggagtttgtgtttattttattgtttttatttggaatttatatttttaatgtagagaatttataaataagataagaaataagaggtaaatattagttttgtattttttttttttggtattataatatttttgtatttttgttatgtatatttatattttgttagaaaaatgagataatatattatatagtttttattttttttttatttaaaatatatgaagagtattttttaatgttagtattttgtatttaaaaaaagattatataaaatgttattgtgtaaagtatagatatgtaaaa

SEQ ID NO: 51 - DNA, 4501 bp, Artificial Sequence
  chemically treated genomic DNA (Homo sapiens)
aagttgttttaggtgtagaaattataaagtaagtaggagtaggtttttgtttttaagatgttttatatgtagtatagatttaacgtatttaaaacggaaggttgttattttttttgtttttttaatttatataataatatatattcgtgttttatgttttaattatattgaattgtttgttttttttattttcgtttgttaatagtgagtagtttggtgtttttagattataggggtgggagggaaagagagagatagtagataattaggttggggtagatagatattagattttgatgttaggtggaggaatttagatgtattggttgttgttttaagttatttttttttggtttaaattttagattggtcgtatagtttaatttttttttttttattaaaggttatttgtgtagaagatgatataaagggggatttagtacggtgattcgtgtttgtaatttttgtattttcggaggttaaggagggaggattatttgagtttaggagttcgaggttgtagcgagttatgatcgagttattgtattttagttttgacgttgagtgagattttgttttttaataaaatatatttaaaatttaaaaagaagattatataaaggggttatttattattttggttagtaatgtagggtaaaatttgaaataatttggttttgtagtattttttagatgttaaatttttattttttattgtatagtttttatagtgttttgtgtgagatgagagggagtatggcgggttttagttggttttgttttgggaaaaattttttatttttgtatcgtttttttaaagcgggggttaagttagcgtcgtttgtttttttatttagattagattttttttttagatgtttttatttttttgaagttttataataattttgtgaggtaagtattattatttttttattttatagatgaaattgaagtttaggaaggttacgtttcgggttttaaatttcggaattttcgtttcgatgttatttaggtttgggttattgagtttaagaaacgggtcgacgggtgattagacggacgtcgggattagtttaagtttagggttgagggtcgttaggtggcgcgtttttttttttttatttttcgcggcggttcgggcgtatttgaatttagcggggtgcgtcggggaaagtaggcgcgtagggtggggcggggagtagttttaattttttagttcggagtgggtaaggagtacggtttagtttagtcggttggtatcgttaagcggtcgtcgggtcgtattagttttttttttgtttgcgttttttagcgtgtaatttatttggggggttatcggggattgaacggagcgggcgagcgttgttaggaggtggggtcggttttatttgtcgattgttcgtagtaggtagggagagggcggggtttgttttatagggttcgttttttagtttttgggtttcgggcgcgcgacgagatataaggtagttaggaaataatgcgtttgtagttcgcgttttcgcgtcgatttcgagagcgttcgggtcgtcgtgcgcgagcgagggagggcgcgcgcgcggggggggcgcgtttgtgagtgcgggtcgcgttttcggcggcgcgtatgtgcgtgtgtgttggttgtcgggttgtttcgagtcggcggggagtcggttcgttttaggtggcgggcggttggagcgaggtgaggttgcgggtggttagggtacgggcgcgggtttcgcggtgcgggttggttgtaggttgttttttgggtacggcgcgttttcgttcggtttcgtcgggttttgggagttgcgtttcgggcggcgttggtaaagtttgttttgaattcgttgtttatagtcgggttcgcgcgttgcgattggttttttttattattttgattcggggttcggtttttcgggacgcgaggattgggcgtaggttgtaagttggtggggttggggaggaacgagagttcggtagtcgattgtgtcgagggattcggggatatttttttcgttcggtcggtattcggttagtacgtttttttttttttttcgtagggagcggatatggattacgattcgtattagtattatttttacgattatgattgcggggaggatttttatcgttttacggcgtttagcgaggatatttggaagaaattcgagttggtgttatcgttttttacgtcgtcgttttggggtttgggtttcggcgtaggggattcggttttcgggattggtttttcggagtcgtggttcggagggtgtatcggagacgaagcggaatttcggggttattcgaaaggttggggtaggaattacgtttttattatacgtcgtgattgtatgtggagcggtttttcggttcgggaacggttggagagagttgtgagcgatcggttcgtttttggcgcgtttcgggggaattcgtttaaggcgttcgtcgtttcggattgtatttttagtttcgaagtcggtaattcggcgttcgtcgttttttgttcgttgggcgaatttaagatttaggtttgtttcgggttcgagagtttaagcgattcgggtaaggattttttcgagttatttaagagggggttattttatgggtggttaaagttttgtttttgtttgaggttaggtattggttttttttaagtttttgggttattttcgtttttttttggttgaagttgttcgtgtagtttttaatcgtgtttgtttggtacgtgggtgtgttggtaaatagtttggaaaagtggcgtgggagttagtttttttttgatgattattggagttttaggggataagggatttgaggtgagggttggcgtttagagaggataatattggggttggattgtaagggattgaagggggtattttaagagatattttaaatttgaagtttttttgttgttgtttttttttttaggaaatttatatttttttagggggagaagaagtcgagagttttttgtgtaaagttaaaattttcgtttttttaaaaatttaggtttttagttggttttattttaaaatgttaataataaatgtttttttttcgtgtttttttattattatttattattcgtgtatttttgagatagggagggaagaatgaatattttttattaatagatggaaaaattgaggtttagagatagataattattataagttagttttagttttttgttatttagttagttttttttttttaatgttttattttaattaggtattttttttttgatgtttggggtttttgtggtagtttattttagaagtattatattttgttttgttgtttgttttgagatggaaaagtgttttttttgtttttttttaatagatttttagcgttagttgttttttggtatttaataaatatttattggtttttattttgtggtaatttgtgggttatatgttggggttaaggtagtagaattttaggttttttttttttatttttgatgtaagtgtaatttcgttgagggtagattggggtattttgtgttattaaattatattgtttttattttggtattttagatttttatattcgtgagaaattttggagagggtatttttgtagagtgtagattgtggttagtgataaataaattaggattaagaaagtttattgtagtttttaggaataatttttatacgattatttgatagggaattggggaatggggtatggaagtttttttatatttgagagaaaaaataggataataaaaattaaaagtttttttttttttggtttattgtgttaaggttatttttaattagtttgttttttatattaagagtttatgtttgtttaatggttggaaagagaattttgagattaaaaaattaataaagatgtatttttataacggttggtggagtggtagagtggaaagagtattgttttggaagttggatattttagtttgagatttagaacgttataaaggtgatatgtggatttcgttgatttgggttttagtttttttatttgtatacgatggggttggatttgattgttttgttgatgatatttttttgtttggatagagtaagatattattttttgaaagggagaatggtgttttaaattattttttttttagatagaatttttttgagttacgaggtttaatattgaaaattaaaggtttgggatgtagggaagtttgttgaattattttttaatttattttttaatttgaatttgtttgtgagtttttagtttatttataggttatatggtttggaataaaatgtaatagattgtaaataatgaggcggggggtggggaaagtgattggtagtagagtttatttaataggggttaggggttgggtaagatagaagtttaaatatagcgtaattagttaattatgggttttggggttaggagggttgaatggttaggtttattaatggagaaataatgcgattgtttatataatggaagtttttttgataaa

SEQ ID NO: 52 - DNA, 4501 bp, Artificial Sequence
  chemically treated genomic DNA (Homo sapiens)
tttgttaggaaggtttttattgtgtggataatcgtattatttttttattaataaatttgattatttagtttttttggttttaaagtttatgattggttgattacgttgtgtttggatttttgttttatttagtttttagtttttattgggtgagttttgttgttaattattttttttatttttcgttttattgtttgtaatttgttgtattttgttttaggttatgtggtttgtgagtgaattagaagtttataaataggtttaggttaaagggtaggttagaaaatgatttagtaggtttttttatattttaaatttttaatttttagtgttaagtttcgtggtttaggaagattttatttaagaaagaaataatttaagatattatttttttttttagagagtagtgttttattttatttagataaggaaatgttattagtaggataattaagtttaattttatcgtgtgtaaatggggaaattgaggtttagattagcgaagtttatatattatttttgtaacgttttggattttaaattaaaatgtttaatttttaaagtaatgttttttttattttattattttattagtcgttgtagagatatatttttattggttttttgattttaagattttttttttagttattaaataaatataaatttttggtgtagaaagtaagttggttaaaaatgattttaatatagtggattaggaaaaaaaagatttttaatttttgttattttatttttttttttaagtgtaggaaaatttttatattttattttttagttttttattaaatggtcgtgtaaaagttatttttaaaagttatagtgagtttttttggttttaatttatttgttattagttatagtttatattttataaaaatattttttttaggattttttacgggtgtggaggtttaagatgttagaataagaataatgtagtttagtggtataggatgttttagtttgtttttagcgaggttgtatttgtattaaggatgggagaggagggtttggagttttattgttttgattttagtatgtagtttatagattgttataaagtaggggttagtgaatatttgttgaatgttagggagtagttgacgttggagatttattgagggggagtaagaaggatatttttttattttaggataaatagtaaggtaaggtgtagtgtttttaagataagttattataaagattttaaatattaaggaagaggtgtttggttgggatggagtattggggaagaggggttggttagatggtagaaagttggagttgatttgtagtgattgtttatttttaagttttagtttttttatttgttaatggggagtgtttatttttttttttttgttttagggatgtacgagtggtaagtggtggtggggaggtacgagaagagggtatttattattggtattttaaagtaaagttaattggagatttaggtttttaaaaggacgaaggttttggttttgtataaaaggttttcggttttttttttttttaggggagtgtgagttttttagggaaagaggtagtagtaaaaaaattttaggtttggagtgttttttaaggtattttttttaattttttatagtttaattttagtattgttttttttaagcgttaatttttattttaaattttttgttttttggggttttaataattattaaagggaggttggtttttacgttatttttttaaattgtttattaatatatttacgtgttagatagatacggttggggattatacgggtagttttagttaaagagaggcggagatggtttaagagtttgagaagagttaatgtttgattttaggtaggggtagagttttggttatttatggggtggtttttttttggatggttcggggaggtttttattcgagtcgtttgggttttcggattcggagtaggtttgggttttgggttcgtttagcggatagggggcggcgggcgtcgggttgtcggtttcgaggttgggagtgtagttcggggcggcggacgttttgggcgggttttttcggggcgcgttaggagcgagtcggtcgtttatagttttttttagtcgttttcgggtcgagaagtcgttttatatgtagttacggcgtatgatggaggcgtagtttttgttttagtttttcgagtggtttcgggatttcgtttcgttttcggtgtatttttcgggttacggtttcgggggattaatttcgggggtcgggttttttgcgtcgggatttaagttttagggcggcgacgtggggggcgatggtattagttcgaattttttttagatgttttcgttgggcgtcgtggagcggtagaaatttttttcgtagttatagtcgtagaaatagtgttggtacgagtcgtagtttatgttcgttttttgcgggagggaaggggggacgtgttgatcgggtgtcggtcgggcgaaggaggtgttttcgggtttttcggtatagtcggttgtcgggttttcgtttttttttaattttattagtttgtagtttgcgtttagttttcgcgtttcgggaagtcgggtttcgggttagagtggtaggggaagttaatcgtagcgcgcggattcgattgtgggtagcgagtttaaagtaaattttgttagcgtcgttcggagcgtagtttttagggttcggcggggtcgggcgggggcgcgtcgtgtttagaaggtagtttgtagttagttcgtatcgcgggattcgcgttcgtgttttggttattcgtagttttatttcgttttagtcgttcgttatttggagcggatcggtttttcgtcggttcggggtagttcggtagttagtatatacgtatatgcgcgtcgtcgagagcgcggttcgtatttataagcgcgtttttttcgcgcgcgcgttttttttcgttcgcgtacggcggttcggacgttttcgggatcggcgcgggagcgcgagttgtaggcgtattgttttttgattgttttatatttcgtcgcgcgttcgggatttagggattggggggcgggttttatgggataaatttcgttttttttttgtttattacgggtagtcgataggtggggtcggttttattttttggtagcgttcgttcgtttcgtttaattttcggtagttttttaaataaattgtacgttggggagcgtaaataggaggagggttgatgcggttcggcggtcgtttggcggtgttagtcggttgagttaaatcgtgttttttgtttatttcgagttggggaattagggttatttttcgttttattttgcgcgtttatttttttcggcgtatttcgttgggtttaggtgcgttcgagtcgtcgcgaggggtagggggagggaaacgcgttatttggcggtttttagttttgaatttgggttggtttcggcgttcgtttggttattcgtcggttcgttttttgagtttagtggtttaagtttggatggtatcgaagcgaagatttcgggatttagagttcgaaacgtaatttttttgagttttagttttatttgtaaaatgaagggatggtaatgtttattttatagggttgttgtgaggttttagggaaataagagtatttagggaaggggtttggtttaggtggagaggtagacggcgttggtttagttttcgttttggggaggcggtgtagaaatgaggaattttttttagggtaaagttagttgagattcgttatgtttttttttattttatataaaatattgtaggagttgtatagtagagaatgaggatttggtatttggaaaatattgtaggattaagttgttttaagttttgttttgtattgttggttaagatgatagataatttttttgtataattttttttttaaattttaaatatattttgttaagagatagggttttatttagcgttaaggttggagtgtagtggttcgattatgattcgttgtagtttcgaatttttgggtttaaatgattttttttttttagttttcgaaagtgtagggattataggtacgggttatcgtgttgggtttttttttgtgttattttttatatagatgatttttggtggaagagaaaaaattaaattatacggttagtttgagatttaggttagaggagagtaatttgggatagtagttaatatatttagatttttttatttggtattaaggtttggtgtttgtttattttagtttgattgtttgttgttttttttttttttttttatttttgtggtttaagaatattaaattatttattgttggtagacggaagtgagaagggtaagtaatttagtgtggttggagtatgggatacggatgtgtgttgttatatgggttgggaaggtagggaaaatgatagtttttcgttttagatacgttgggtttgtgttgtatgtgggatattttgaaggtagaaatttgtttttatttgttttgtgatttttgtatttagaatagttt

SEQ ID NO: 53 - DNA, 6894 bp, Artificial Sequence
  chemically treated genomic DNA (Homo sapiens)
gatagtttttattattagaatttagagtttaggagtatagttttatattggttttttttaaagtttggattataggattgttttttagaaaagtttgaaagtttttggtaaatagtatttagttatttagttttttttttttagtttttttttagaagagtaattcgagaaaatatttagtagcgtagaggaaagcggtatagtgttgttaatttatttttagtaagatttacggaattttaaaaatatagtttatgggttttaggacgtttgtagttttgttgtttaaaggttttttgtagtattaattttttttttaaattataagtggtgtttataggttttgttgttttttaaattttagagagatttttttttaaatgaaatttagagaatagaaagatttaaaattattttgatttggttagatatagaggtttaagattgttaagttattttgtgtttatttttttattaaagttattaaaatttttttattaaatgaatatttatggaagcgttaagattaattatttttggagttaaatagattttgatttaaattttagttgtgtaatataaagtttgtgggattttagatcggttttttggtttttgggttttaattttttaggggtgagttagattaggggtgagttagagagaataggatttttttgtattgttaataagaggattaaaatgagatttattatgtatagtataggatataagattagttggtatataataagaatttaatatataatagagttttttttttatttttggagtttttaaaaaatataaaaattatatatattttttttggttaaagatgatgattaatataaaaattttattttaggtttatgttttttggattttttaaagagtatttaatagagtgagttatatttggggttatatttgagttattcggggttatgtttttgtgttttgtgatgttgttaattcgatgatttgtgcgttttttttagttaaaaaataaaagtcggttttgtttttttttgtagttttttgaatagttataattattttaattgtttgttttgtttgttaagatttacgtttttaggtaaacgaattaattaagtttttttttgggtatagattataaagttatgaaaaatttgttttttttttttttttttatttattattttatttttgttttttggggagtattgtagagttagagttttttaagattttgtttattgtaagtttaaggtgatggagtttggttttcgggttaggagttaattttagaggttttaataatataagaaagaatgagatttaaagattattttgttaggtgggatggtttatatttgtaatttttagtgttttgggaagttaaagtgggaggatgttttgagtttaggagtttgagataggttttaatagggtatggatagaggaaagtagtatggaattgaagggtggatatttattgtttagtaaattataaattttggaaggaggtggaagggttttagatttgtgttgtttgtagtgaagaaattaagatataaaaaagtaaatgggagaggatagtagacggttttgaatggatgagagttagatatatggtaggtgtagatttttatttaagttttttaagttaaagatattgttgaaatatttggattattgacgttattttatagtaggtttttgtgaagtttaaatggagtgagttttgttttttttaattgttatttagtgtgttttataggtaatttttaagtaggaataataggagtatagtaatgtagtagaatttataaattttatttggtattgagaaaggttaagtcgagaggaaagtgattgttgttaattttattgtagtttgtgttggagtagggggtgttgtgtttggttttttgtatttgttgttattatttttgttatttgtgaaaggagtgtgatatggtggttataaggcgggttttgttgtattttttttagattgtggttttgggcgtttgtttaatttttttggggtagttttttttgggggttgagtgagtgaatgtatttggagaattaggtggtgtttatggtatgttgagtatttataaaggttattaattcgtgttattggttttttaattaagaatggggttatatattatttgtagtttttattattagtttggtagtatttataaacgtgtagtagtaatgtttgattggtggttttttgaagggattttatgggtatattgtgtatttgtttaaatttagggttttttatggatttataggattggtagttgtaggttagtaatgtatagtaattgaagttgggtttttaaattatttgtttttaaaaaaatattataattatttttaatatgtttttttttttttatgaattttattattaaatgtatttgaaattggaaatatatattaattttgattatatttaatggatttatgagatgggagtatttgttttagtagagtttttatatatggtttatgttggttataggtgttggtttttgtattaattaggattttgaagaggaaaataaatagtaggagatgggtagagatataaaagatttattataaggaattggtatatatagttatggggttgcgtagttttaagttttatatttagtaagttggagatttaggagagtagatgatgtgttttggtttgaaagttagtagacgtgagatttaagaggagtttatatttttgtgttagttcgaaggtaggaagagattagtgtttttattaggtagttaggtaggaggagttttttaggtcgtcgaggagttggtttgttatttttaggttttttgttgattggataaggtttttttttattttagagggtttttgttttatttagtaatttgtttaaatgtgtattttatttagaaatatttttagatatatttagaatattgttttattatatatttggtattttgaaatttagttaggttgaaatatgaatattaattattataggtttttttttattatcgatgtttttttagtaggtggggtatagtatataggattttttttatttttgaggtttttttagtaggtgggatatagtatataggttttttttgttattttcgaggtttttttagtaggtgggatatagtatataggttttttttgttatttttgaggtttttttagtaggtgggatatagtatataggtttttttttatttttgaggtttttttagtaggtgggatatagtatataggtttttttttttattttcgaggtttttttagtaggtgggatatagtatataggtttttttttttattttcgaggtttttttagtaggtgggatatagtatataggttttttcgggtttgggtaggaggtacgaaggtgatttatttttgtttgtttaggattgaggtggtttttgagatgtagaatttttggtttttaaattttgtttatgttttaggtaaataaggtaaattggttattttaggtagaatttttatagtagttacgttttgttaatttttttttttcgtatttatcggatttataaatttttttttgaatatttgatttttgatttaattttttttaaggtaattagtttttttttagataagtttttagagtgaggtcgtgatgggtttttcgtggattttagattataggttgtgtttttaaatttgttttttttaggaagtgtttttttcgttacgtggtgttggttttttttattggtgtattgtcgtagttcgtttttattttagagatatagaaaataagaagtttttagaaatgttagttttaggagttttatttttgaaatagaagtgttgacgtttattgtatagttatttttgggaatgatatattagtatttttatcgttattttataggttgtggggttaggtagtgatttagggagacgagtagtgagaaggaatggattaaatatttttcgagtttatcgagtttagttatcgttttttagttagagaaggtagttgtgggtttttttgtttttatatggatttttttttgttttatttttttttttattaagggtatcgttgttgtttatttgtttattttatatttacgtgtgtttacgagaaggatgggagggaaagtggggcggtaaagaataatttttgttattatttttcggtttaaaattttattaaagtttttttttataaagtgtttaagatgagggtttagtatattattttatttaaattataatattttatatatatttttataaatgtaaggggtataaaagtgttattttgttatatggatatatcgtgtagtggtgaagtttgggtttttagtgtatttgttattagaataatatacgtgttatttatagggtaattttttattattcgtttttttttattttttcgagtttttaatgtttattttatattttatatttacgtgtatgtattatttagtttttatatataagtgagaatatgtagtatttgattttttttttttgagttattttattttgataatggtttttatttttatttatgttgttgtaaaagatatgattttattttttttgatagttggggagtattttattgtgtatatgtattatattttttttatttatttatttattgatgaatattttagttgattttatatttttgttattgttattagtgttgtaataaatatatatgtgtaggttttttttaatatattgatttttttatattttatggagggaatagagtttttttaagcgagtgtggttggtttttattttttagtgtattttgtaattaatatttttgtatatttttttttaggtgattgggagattttaatttagatttttagtaagtgttataaggaagaaaagattttgaagaattaattaagtttttcgtgaagttaagtttaagtaatattttcgttttaattataagtaggagaaatgaagtatattattaattcgtatgaaaatattaataatatagtaagaaataatttcgattgttttcgtgtggttttgtcggaggagatattttttataatttttattgttggagttttggagaatttgatcgttttgttggttgtgtttaagaataagaatttttaggtatttatgtatttttttatttgtagtttggttatatttgatatgttgggtagtttatataagattttggaaaatattttgattatattgagaaatatgggttattttaagttacgtggtagttttgaaattatagtcgatgatattatcgattttttgtttgttttttttttgtttggttttatttttagtttgtttgtgattgttgcggatcgttatattattattttttacgtattgcggtattatagtatcgtgattatgcgtcgtattgtggtggtgtttacggttatttggacgttttgtacggggattggtattattatggtgatttttttttattatgtgtttatagtgattatttttacgtcgttgttttcgttgatgttggtttttattttgtgtttttatgtgtatatgtttttgttggttcgattttatattaggaagatttttattttttttagagttaatatgaaaggggttattatattgattattttgttcggggtttttattttttgttgggttttttttgtgttttatgtttttttgatgatattttgtttaagtaatttttattgcgtttgttatatgttttttttttaggtgaacggtatgttgattatgtgtaatgtcgttattgatttttttatatatgtttttcggagtttagagtttagggacgtatttaaaaagatgattttttgtagtaggtattggtagaatggttgatttttggttttagaatttatgggaataacgttgttaagtgttagaatagtgtaatattttaataaatgttagtgttttttattggttttttttttttaatggatgtaaggatgattttattagttagtgtttttaatagttaggttttatgtgaatagttttattgtaggggtaattttttaattttgtgattggatagataaaacgatgtagtaaaagaaggatagaatataaagtattaggtaggtataaaagtaattaaggtttttgttattatttttaatgattaaaaattgtaattatttttgtattaatttagtaaaatagtaataaaaatttaagggttttgggttaaggtaaagatttgtttttttgtggatatttaataagttagttttgaggtggtttttttaggtggaggttattgtagttaatttttagaagttaagtatttggatatgcgattttaggtagaagatgtagggtttttgtaagttaataataaattggaaggaatgtattgttgtagttgaatttgtttgttttttatagttatgtggaatttttatttttttttttttttttgttagtttgatgtattgatgttattttagttttagaaagtaggttgagtataaattataaatgttaaataacgagtttcgagtttttaatgataaatggattttttttgttagttttttttgtttatttagtattttattggttttaaaatttttttttgttatatttttttatgttttatgagtatatattttaaaggaagaaatgaaaatttaatttatttagtttttatgtgggaatatataaaggttagatgaaaattgttattatttgaagaagttgtaattaaattatgtgtgttataatgtagaagtataagaaaagagttttaatatgtattttaagaaataaagagagagagatagagatagatagagagagagagagagagagagagagagagtgt

SEQ ID NO: 54 - DNA, 6894 bp, Artificial Sequence
  chemically treated genomic DNA (Homo sapiens)
atattttttttttttttttttttttttttttttgtttgtttttgtttttttttttttattttttaaaatatatgttggggttttttttttgtatttttatattgtaatatatatagtttggttatagtttttttaaatagtgataatttttatttggtttttatgtatttttatatgggaattaaatggattaaatttttatttttttttttgaaatgtatgtttataaagtatgaggaaatgtaataggaaagggttttaaggttagtgggatattgagtgagtaaagaagattaatagagaaggtttatttattattggaaattcgaagttcgttatttgatatttatagtttatatttagtttattttttgaaattgaggtggtattaatatattagattaatagggagaaagaggagggtggagattttatatggttgtgggagatagataaatttagttgtagtaatgtattttttttaatttattattggtttatagagattttatattttttgtttggagtcgtatgtttaggtatttaatttttggaaattggttgtaatggtttttatttggaaaggttattttagaattggtttgttagatgtttataggaaagtaagtttttgttttagtttaaagtttttgaatttttattgttgttttattagattggtgtaaaagtaattgtaatttttggttattgaaagtaatggtaaaaattttaattatttttgtatttatttaatattttgtattttattttttttttattatatcgttttatttgtttagttataaagttaagaggttgtttttataataagattgtttatatagaatttagttattagaaatattagttggtgggattatttttgtatttattagggaaggaaggttagtgaggagtattggtatttgttggaatgttatattattttggtatttggtaacgttatttttatggattttaaaattagggattagttattttattagtatttgttgtagaagattatttttttgaatgcgtttttgagttttgggtttcggaaggtatatatgaaggggttaatgacggtattgtatatgattaatatgtcgtttatttggaagagagatatgtagtaggcgtagtaggggttatttgggtagaatgttattaagaggatatgaagtataaagggggtttagtagaagatgaagatttcgagtaggatggttagtgtgatggttttttttatgttggttttggggagggtggagatttttttggtgtgggatcgagttagtaggaatatgtgtatatagaggtataggatgaagattagtattagcgggaatagcgacgtgaaggtgattattgtgggtatatgatgggagaagattattatggtgatgttagttttcgtgtagaacgtttagatgatcgtaagtattattatagtgcggcgtatggttacgatgttgtggtatcgtagtgcgtggaagatggtgatgtagcggttcgtagtaattatagataggttgaagatggagttaagtagggagaggataaatagggagtcgatgatgttatcggttgtggttttaaaattgttacgtggtttgagatagtttatgttttttaatatgattaggatattttttaagattttatataggttgtttagtatattagatatggttaagttatagatgaaaaagtatatgggtgtttggagatttttatttttgaatatagttagtaggacgattagattttttaaaattttaataatggaaattgtgaaaaatatttttttcggtaaaattatacgaggatagtcggaattattttttgttgtgttgttgatgtttttatacgagttgataatgtgttttattttttttgtttgtggttaaggcggggatgttatttggatttgattttacggaaaatttgattgattttttaggatttttttttttttgtagtatttgttggagatttaagttaaaattttttaattatttaaaagggagtatatagaaatattagttgtaaagtatattagaaaataaaaattagttatattcgtttaaagaaattttattttttttataaaatataaagaaattagtatattagaaggagtttgtatatgtatgtttattgtagtattagtgataatagtaaagatatggaattaattaaagtgtttattaatgggtgaatggataaagaaaatgtggtatatatatataatggagtattttttagttattaaaaagaataaggttatgttttttgtagtaatatggatggaagtggaggttattattaaagtgaaataatttagaaagaggaagttaaatattatatgtttttatttatatgtgggagttaaataatgtatatacgtggatatagagtgtggaatggatattggagattcggaagggtgggagggggcgggtgatgagaaattattttatgggtaatacgtatgttattttgatgatagatatattaaaagtttaggttttattattatacggtatatttatgtaataaaatggtatttttgtattttttatatttataaaaatatatataaagtgttgtaatttaggtaaaataatatattgggtttttattttaagtattttgtgagaaaaagttttagtggaattttgagtcgagagatgatagtaaagattattttttgtcgttttatttttttttttatttttttcgtgaatatacgtgagtgtgggatgaatagatgaatagtagcggtgtttttgatgaaaaaagaggtaaagtaaggaaaggtttatgtgggagtaggagagtttatagttgttttttttgattgggaggcggtggttgggttcggtggattcgggagatgtttagtttatttttttttattgttcgtttttttgggttattgtttgattttatagtttgtgggataacggtaaaggtgttgatgtattatttttaaagatgattatataatgagcgttagtatttttgttttaaaggtggagtttttgggattggtatttttggagattttttattttttgtgtttttggggtgaaggcggattgcggtagtgtattagtggggaaagttagtattacgtggcgaggaagatattttttagggaggataaatttgggagtatagtttatgatttgaagtttacggggagtttattacggttttattttagggatttgtttggaaaggaattaattattttggaaaggattgggttagaggttaagtgtttagaaggaggtttgtgggttcggtggatgcggaaggaaggggttgatagggcgtagttgttgtgagggttttgtttggaatggttaatttattttgtttgtttgaaatatggatagggtttaaaagttagaagttttgtattttaggaattattttagttttgggtagatagggatgagttattttcgtgttttttgtttaggttcggggaagtttgtgtgttgtgttttatttgttggggaagtttcggggatgggaggggaagtttgtgtgttgtgttttatttgttggggaagtttcggggatgggaggggaagtttgtgtgttgtgttttatttgttggggaagttttagggatgggagggggtttgtgtgttgtgttttatttgttgggaaagttttagggatggtaggggaagtttgtgtgttgtgttttatttgttggggaagtttcggggatggtaggggaagtttgtgtgttgtgttttatttgttggggaagttttagggatgggaggggttttgtgtgttgtgttttatttgttggggaagtatcggtgatgggagggggtttgtggtggttggtgtttatgttttagtttgattgagttttagggtgttaggtatgtggtgagatagtgttttaggtgtgtttgagggtgtttttgggtgagatgtatatttgaataggttattgagtaaaatagaggttttttgggatgggggagggttttgtttaattagtagaaagtttgaggataatagattagtttttcgacgatttggggggttttttttgtttgattgtttgatggagatattggtttttttttgttttcggattagtatagaagtgtgagttttttttaggttttacgtttgttggtttttagattagaatatattatttatttttttgggtttttagtttgttgagtgtagagtttgggattgcgtagttttataattgtgtgtgttaattttttatagtaaattttttatgtttttatttattttttgttgtttatttttttttttagaattttggttaatataggggttaatatttgtggttagtatgggttatgtatggagattttgttgggatagatatttttattttatgagtttattaaatgtaattagaattagtatatatttttaattttagatgtatttgatggtaaaatttataaaaaaaaaaagatatgttgaaagtggttgtaatatttttttagaaataggtggtttgggagtttagttttagttgttgtgtattgttgatttgtagttgttaattttataaatttatggggagttttgaatttggatagatatatagtgtgtttatggggtttttttaaaaggttattaattaagtattgttattgtacgtttgtggatgttgttaagttggtggtgggggttgtaggtggtgtgtggttttatttttggttgaagggttagtgatacgaattggtggtttttatgagtgtttagtatgttatgggtattatttaattttttagatgtatttatttatttaatttttagaggaagttattttagaaaggttgggtaaacgtttaaagttatagtttggagaggatatagtagagttcgttttgtgattattatgttatattttttttataagtggtaagggtaataataatagatgtaagagattagatatagtattttttattttaatataaattgtaataaaattgatagtagttatttttttttcgatttggttttttttagtgttaagtaggatttgtaaattttgttgtattgttatgtttttgttgtttttgtttagagattgtttgtagaatatattaaatgataattagaagaagtaaaatttattttatttaaattttataaggatttgttgtgaggtggcgttaatgatttaaatattttaataatgtttttggtttaaagaatttggataggggtttgtatttgttatatgtttggtttttatttatttaaagtcgtttgttgtttttttttatttgtttttttgtgttttgatttttttattgtaaataatataggtttagagtttttttatttttttttagggtttgtggtttgttgggtaataaatgtttattttttaattttatgttgtttttttttgtttatattttattgaaatttgttttaagtttttgggtttaaggtatttttttattttagttttttaaggtattggggattatagatatgaattattttatttggtagagtgatttttaaattttatttttttttatgttattggaatttttggagttaatttttggttcgaagattaagttttattattttgagtttgtagtaaataaggttttagaaggttttaattttgtagtgttttttaggaggtagagatggggtggtggatgagaaaggagaaaagagataagttttttatagttttataatttgtatttagaaagaaatttggttgattcgtttgtttgaaggcgtaggttttggtaggtagagtagataattggggtagttataattgtttaagggattgtaaggaaaagtaaaatcgatttttgttttttggttgggaggggcgtataaattatcgagttaatagtattatagggtataagaatatggtttcggataatttaaatgtggttttaaatgtggtttattttgttagatgttttttggaaagtttagggagtatgggtttaaagtgagatttttatattgattattatttttgattaaaaaaaatatatatagtttttatattttttaaaggttttaagggtaaggagaaggttttattatgtgttaaatttttgttatgtgttagttggttttgtgttttgtgttgtgtatggtgggttttattttaatttttttgttgataatataagggagttttattttttttgatttatttttgatttgatttatttttgaggagttgaggtttagagattaagagatcggtttaaagttttataggttttgtgttgtatagttgggatttaaattaagatttgtttggttttaaaaatgattaattttagcgtttttatgaatatttatttgataaggaagttttaatggttttagtaaaaaaatgaatataaaataatttaataattttaaatttttgtatttgattaaattaggatggttttaaatttttttgttttttaaattttatttagagaaaaatttttttgaaatttagagaatagtaagatttgtagatattatttgtggtttaggaagggagttaatgttatagaaagtttttgagtagtagggttgtaggcgttttggggtttatgggttgtgtttttggggtttcgtggattttgttgaagataagttagtaatattgtgtcgtttttttttgcgttgttgggtgttttttcggattgtttttttggagaagagttggggaaggaggattgagtggttgagtattgtttattaggggtttttaggtttttttagagggtagttttgtaatttaggttttagagagagttagtgtaggattgtgtttttgagttttgggttttggtggtgggagttgtt

SEQ ID NO: 55 - DNA, 1157 bp, Artificial Sequence
  chemically treated genomic DNA (Homo sapiens)
ggattttgttttttttgaaggttttagggaagagtgttttttgtttttttcgaaggttttagggaagggtttgtttttttaggtttttggtggtttgtaggtgtagttttttaatttttttttttaagcggtttgttgtttataaggatacgagttatattggatgaggggtttattaattgatggtttttgtaaagtttttatttttaaataaggttatattgtgaggtattgggagttaggattttaatatagtttttttggtggatataatttaatttttaataacgtttatataattttaagtagggtttggtattttgtgtgttttttggagagcggttgagttaggttttggtagtgtttaggttatcggtgattgtagtttttggacggtatcgtttattataggttttggaggttgtttttacggttttttgatagggtttttgttggtttgggggtttttgattaggggagcggttttaggaggggagagattcgcgtttcgggtttagcgtagtcgtttcgagtaggatcgggatttttattaagcgggcgtcgttttacgattttcgcgcgtttttaggattattcgggtacgtggtaggtcgtttgtacgttcgcggattatttttgtgataggaaaaggtacgggttatttggtaaattaaggtatagagttttaggcggaagttgggaaggcgtcgttcggtttgtatcggtcgaagggttattcgggttaggcgtatagggtagcggcgttgtcggaggattagggtcggcgtgtcggcgtttagcgaggatgcgtagattgttttaggttcggcgtcgtcgtattgggtatgcgtcgattcggtcgggcgggaatatttcgtttcgttcgggtttcgttttagtttcgttttcgcgcgtttcggtttcgttttcgcgcgtttttttgttttttttaggttttcggtttcgtttcgttttagatttcgttttacgtcgttattttcgtgtttttcggtttcgttttcgcgtttcggatatgttgggatagttcgcgtttttagaacgttttgcgtttcgacgttcgtaggttttcgcggtgcgtatcgtttgcgatttggtgagtgtttgggtcgtttcgttttcggaagagtgcggagttt

SEQ ID NO: 56 - DNA, 1157 bp, Artificial Sequence
  chemically treated genomic DNA (Homo sapiens)
gagtttcgtattttttcgggagcgaggcgatttagatatttattaagtcgtaaacggtgcgtatcgcgaggatttgcgggcgtcgggacgtaaagcgttttaggggcgcgggttgttttagtatattcggggcgcgggggcggggtcgaggggtacggggatggcggcgtggggcggggtttagagcggggcggagtcgaggatttgagaaaagtaagagagcgcgcgggggcggggtcggggcgcgcgggggcggagttggggcggagttcgggcggggcggggtgttttcgttcgatcgggtcggcgtatgtttagtgcggcggcgtcgggtttgaggtagtttgcgtattttcgttggacgtcggtacgtcggttttggtttttcggtagcgtcgttgttttgtgcgtttgattcggatggtttttcggtcggtataagtcgggcggcgtttttttagttttcgtttgaggttttgtgttttagtttgttaaatggttcgtatttttttttgttatagggatagttcgcgggcgtgtaagcgatttgttacgtgttcgagtggttttgaaagcgcgcgggggtcgtaggacggcgttcgtttagtgagaatttcggttttgttcggggcggttacgttgagttcggagcgcgagtttttttttttttggggtcgtttttttagttagggatttttagattagtagagattttgttagggggtcgtgggggtagtttttagggtttgtggtgggcgatgtcgtttaggggttgtagttatcgatggtttagatattgttagagtttgatttagtcgttttttagagagtatatagggtgttaggttttgtttggggttgtgtggacgttattaggagttgaattgtgtttattagagaagttatgttggagttttaatttttagtattttataatgtgattttatttggagatggggattttatagaagttattaattagtgggttttttatttagtatgattcgtgtttttataggtagtaggtcgtttggggaggaggattggagggttgtatttgtaagttattagaagtttaagaggatagatttttttttggagttttcggagggagtagaggatatttttttttggagtttttagagggagtaggattt

SEQ ID NO: 57 - DNA, 8093 bp, Artificial Sequence
  chemically treated genomic DNA (Homo sapiens)
ttatggaaggaaatgagattagttagcgagttgatatagaataaggtagtttaaaataaatttttttaaaaatacgaagaatagatattgaagggaagaggtgtttgtaaagattaagaaagtatatttggagatggtatttttttaaagttaaagttattaagtgtttaagtgttttaaggagggtaagattattaataaggatttagtatagtagagtaatttgagtggtaatacgggatattgggaatataaatttgttaagaaaattagtaggaatgagttataggatagtaattggtaaggatttaataattttttttttaatgtacgtattttaattatatttattgttataataggattagtaataattatatttatttaaaaaaaaaaagattgttatgtagttatagaattatttaatatagaaaatagtaaaatatatttttttttttttttttttttttttttttttttataaataagattagtttatagtaaattttttatagttaagggttaatttaaaatttttggtttatattttttttttatttaatgattatatgatgtaaattaattttattaatattttaagtaaaatatattggaattttataaaatgtataagattttaatatttaaggaattggggttagaaagtagaagtggtttttaggttttttagttttttttttaagtaataaagttttgttgtgaatatttaaagttattgggaaattatcggtagatttttttgtttttttttttcggttttttattatgttgtttttttagatatgtaagtttattttattaattaaaattttagtttgattatttttgataagtatttaatcgatatgtaattttttttttgttttaaatatgtataataggatagagtttttaaatttgatttaattattaatttttgatttataagtgttatggtgagttaatagaatttattaatgtttttattgtattttattagttaaatttagaaggttggaattagttttttttatttagtattttgttagtttgtttagtttgtatttttaattttgtttttaatggtaatttgttttattttttgaaataaaataatttatattttgggagggttaattttttattgtgttaggttgttttatgtattgtaggggtgagtgtttttaggtttaaatgttaatagaagtttttagtaaatatgataattaaaaaagtgtttttatatattttttagtattttttggaatgataggttattgtttttagttgaaagttattggtataattttggtttttaagtttttatgttatttattttaattgtttagatattaattttatttaaatttttagttatagtttggttttttgaatttgttggattagtaattatagattaaggtgttttaatagttaagataggattttggaataagagtttttaaattgtataatatttgagaggatttatgaatataaattgggttttgtttataattagttttatataatgaattttaagattgtttttttatggtgaatagaagtttggaaattattgttttggtataaagtagattattttagtagaaatatagaattattgtaatttgtgaataagattgtttttaaatatttttatttgtgtgttattttatatatagaatgtgtacgatagttttaaattttagaataaatttatttttagtatttaataaaatttgatattgtattattttaaaataaagtgtttattttaggtaggattttttaaaataaagtagtaatatttacgtagataagataaaaaagttaaaatattttatattttttaattttggagtgtaattttttttttttatcgtttttgatagggttaaatttgtgtttatagtaaaaaaaaaaaaaaaaagaattattaattggtaattattaagattttatatttattatagttttttaataggtaagttgataaaatagtttttagttattaaaaaaaaaatttaaggaaaatttttaataattagttttatttttaaattgtatgaagttttttatatttgaaatttaaaaatgattttaatgattttttttattagtaatgtgttattattgaggtgggtgatggggagggaagagggaagaaatttgttagtattattttcgaatttagaaatgtttaaaaaaaagttttaaatattttgatggttagataaaatatttttattgttatgtatgggttttttttttggaaatttatgaatttgttatgtgagtttttgtaaattggtttaaaagtatatttaaggagttgataatttaagattatatgaattagaattttaatattttattaaaataagagttgaaatttttggtatttatttttagaatatttaaaaaatagattgtaaatttaatttatattaatattaaatttttttaaaattaattatattataaaagataatgattttgttattaaattaagttttaaaaaaggtggtatttttatgttttagttttatgttgttatttgagatgaaaaaaaaggtaattgttagaattttaattgtgattagtttggacggttggtatttggtatttttttataatttaaattagtaaatttgaaaatttaaattaatttttgtttttagaattaaatttttgttgagttttttaattttgtattataaagttttatggattagatttattttttttttttataaggttattttaatcgggttttattttagttgtggtaattcgaaatagggtttggagatgtttatttgttaatggttgatttaaagtgtgttggtttcgagttaaatatgaaaaagtttttttatagatttggttattattaaataaggatgttattttataggtaatttttttgataattgggtaggatttagtagataatttagtataaaattgttttaagtttttgattttgtatttattttaaagattagtgtttgtttgaagttttgttagttttatttttattgaaataggtgtatatttaggtttaaagttaaatggatttgaaaaaagttttaagttttttttaatgaatttgaggtttttaaaatgttttttaaattttttttggagacgatagattattatttgatatttattaggattaaatatttttttattttttttattttgttgttttagtttattaataatttttttgagggtaggaaagtttgttagatttttttttttaatatgtttttgaaataaatttagtttaatttcgaaagtataaatatggttaaaggtagtagtagtaaagattttattaattcgtaattttttattgagttttcgaaggtgttttataatgtttattaagaagttaaagttataaagttattgtttgtttgagaagtggattgttgttgtttttattgaaattaagaacgtttttatttttttttttagagagaatattagttttaaagtttttttttttttaagttaattgtttagatatcgtttattaatttttttattatgttttgatttagatttcgttagtaaagtttgaaatttaggtcgtttaacgtttttggttttaattaaaattatttattcggatatggtatttatgatttgattaatatttatattataggagtttaatagttttaagtgaagaaattttgaataatgaatgatattttaatagttggggtttacggtttttttttttatgtatgagacgagttttgagtttttattaattatttttaaagtatgggtcgtggttagtttaattattttttgtaagttaagttttgttgtttgtagggattttaggattgtcgatatgagcgtattaatattgaaatgatgagttaggttgattatggttagaagatttttttgtatttttaatttagggtttatatcgcggataaagattaggaggtagtttttataggttataaaagtttggtcgtttaaggtaagagaataggttttaaagtttttggttcggttaaaaagttggttgcgtagatttttgttaatgtttaggattttttgttttgtgatatttggagataagttaacgttttgtaggacgtttatatgttcgggtagtattttttttagtaatatttttatgtattggtatataaagttttttttattttagtcgcgattttttaaggttaagaggcggtagagttcgaggtttgtacgagtagttttttttttaggagtgaaggaggttacgggtaagtcgttttgacgtagacgttttattagggtcgcgcgttcgtcgttcgttatatatcgttcgtagtattcgtgtttagtttcgtagtggcgtttgacgtcgcgttcgcgggtagttacgatgaggcggcgatagattaggtatagggttttatcgtttttcggaggttttattattaaataacgttgggtttattcgggtcggaaaattagagtttcgtcgatttttattttgttttttttgggcgttatttatattttgcgggaggttataagagtagggttaacgttagaaaggtcgtaaggggagaggaggagtttgagaagcgttaagtatttttttcgttttgcgttagattattttagtagaggtatataagttcggtttcggtatttttgtttttattggttggatatttcgtatttttcgagtttttaaaaacgaattaataggaagagcggatagcgatttttaacgcgtaagcgtatatttttttaggtagcgggtagtagtcgttttagggagggacgaagagatttagtaatttatagagttgagaaatttgattggtatttaagttgtttaattaatagttgtcgttgaagggtggggttggatggcgtaagttatagttgaaggaagaacgtgagtacgaggtattgaggtgattggttgaaggtattttcgttgagtatttagacgtttttttggtttttttggcgttaaaatgtcgttcgtggtaggggttattcggcggttggacgagatagtggtgaatcgtatcgcggcgggggaagttatttagcggttagttaatgttattaaagagatgattgagaattggtacggagggagtcgagtcgggtttatttaagggttacgatttaacgggtcgcgttatttaatggcgcggatacgtttttttgttcgggtagaggtatgtatagcgtatgtttataacggcggaggtcgtcgggttttttgacgtgttagttaggtttttttttttttcgtagatcgtgtgtttttttatcgttttttttcgagattttttaagggttgtttggagtgtaagtggaggaatatacgtagtgttgttttaatggtatcgttaattaagtaaggaagttatttaatttaaaattatgtatgtagaatatgcgaagttaaaagatgtataaaagtttaagatggggagaaaaatttttttttagagggtattgtgttattgtttttttgttttttatttattttagaaattatttgtttatatttaaaggtataatttattttgagttttttttaaaataaatcgtttgtagttttaggataggttgatgtattttgggtttgatttttgattattttattgttaaattagtgattttttttagtgtttttttgttttttatttcggaggacgtatttcgaagatattagattttatgggttatttttggattttgaagtttataattgtgataaaaaatgtgaagggaagagatttgaaatatgtggaaggaaaagtgagtgtagattataaatttttaaaaagataagtttaaaatatatttaaacgttatgttagattattttgttaaaattagttgttagtgacgttcgtacgttaatagaaaaaagaatgttttagtttggagtggtaggtttttagagggatttattgtgaaagtataaattatttagggtaatgggattgagagaatagtgggtagaaaggattattgaaggaaaggaagagaattggaaggtagatgaaagaaggagtaagaatttggggatgtttttttttttttatttgtaatagtagtaatagaagtaatggtagattggtttttgtttttattgtgttagaatgaattgataggataattgggtttattattgtattgtgttagaatattgtaaaataaaattaaatatattagtttggtggtttgtaattaattatttaagtggagatttttattttttttttattttttttttagacggagttttattttgttatttaggttggagtgtagtggcgcgattttagttgattgtaattttttttttataggtttaagggagatttttttgttttagtttttcgagtagttaggattataggtatgtgttattatatttggttaattttgtatttttagtagagatgggatttttttatgttggttaggttggtgttaaaattttcgattttaggtgaatcgtttgttttagttttttaaagtgttgggattataggcgtgagttatcgcgttttgtagttttttgtatttttaatagagatagggttttattatgttagttaggatggtttcgattttttgattttaggtgatttgttcgttttggttttttaaagtgttgggattataagtatgagttatcgcgttcggtttaagtggagatttttatatggagtttagttatattttttttaatatataagttgagatgattaatataattttaatataggggtttatgagaaatgtttgtaatatttaagtaatttattgtttttttttttttttttttaagatgaagttttattttgttgtttaggcggaagtgtagtggcgtgattttggtttagggtaatttttgttttttggttttaagcgatttttttgttttagtttttcgagtagttgggagtataggcgtgtatgattatattcggttaatttttttatttttagtagagacggggtttttttatgttggtcgggttggttttgaatttttgattttaggtgattcgtttattttagtttttttaagtgttgggattataggtgtgagttttcgtgtttagtttattattttatttttgaataaagaattgtttgtgtggggaatagataatttttttttatgtagtttttgttagaaaatttgttttttttagtagttggtttgtgtttataggttattttttgaaagtataaaaaatttattgattttttttttttgggtttttttttttttttgagatagagttttgtttttgttgtttaggttggagtgtaatggcgcgattttagtttatcgtaatttttattttttgggtttaagtgatttttttgttttagttttttgagtagttgggattataggtatgcgttattatgtttggttaattttgtatttttagtataaatggggtttttttatgttggttaggttggttttaaatttttgattttaggtgatttattcgttttggttttttaaagtgttgggattatgggtgtgagttattgcgtttggttagaaaatttattgattttttaaagatttattaattttttgtattattttttttttttttttttatcgtaaatataaaagggaatagtagagaaaattatttagaattttattttttagtgatattatttagtgatattttattagagttatttaggaatttgaggttgaataaagtttaggtaaaagtaaaattagttgagaagagatatttgttaaaagaaatttatttttaattttatttgttgttttttttagaggaatagaaatagtgttgaatgttttattagaaatgatggttgttttgttcgtttttttttttttttttatataatatgtaaatttatatagtgtatgagtttgtaagataaaggaaaaatacgttaatgaggtattattgtttgtatttggagtttgttattattgtttggtttatattaaaatatgtatattagagtagttgtagattgataaattattttttgtttgatttgttagt

SEQ ID NO: 58 - DNA, 8093 bp, Artificial Sequence
  chemically treated genomic DNA (Homo sapiens)
attggtaaattaaatagaaaataatttattagtttgtaattattttaatgtatatattttaatatgagttaagtaatgataataaattttaaatataaataatagtgttttattaacgtgttttttttttgttttataggtttatatattgtatgagtttatatattgtgtgagagagagggaagagacgggtagagtaattattatttttaataggatatttagtattatttttgtttttttaggaaagatagtaagtgaagttaaaaatagattttttttggtagatgtttttttttaattaattttatttttatttgaattttatttagttttaggtttttaagtgattttaataaaatgttattaaataatgttattaaaaaataaaattttgaatgattttttttattatttttttttatatttacgatggaggggaaaaaaaaaagtaatgtagaaagttaataaatttttaggaagttaatgaattttttggttaggcgtaatggtttatatttataattttagtattttgggaggttaaggcgggtggattatttgaggttaggagtttgagattagtttgattaatatggagaaattttatttgtattaaaaatataaaattagttaggtatggtgacgtatgtttgtaattttagttatttaggaggttaaggtaggagaattatttgaatttaggaggtggaggttgcggtgagttgagatcgcgttattgtattttaatttgggtaataagggtaaaattttgttttaaaaaaaaaaaaaaatttaaaaaaaagaagttaataaattttttgtgtttttaaagagtagtttataagtatagattaattgttagagaaaataaattttttagtaggggttgtatgagaaagagttatttattttttatatagataattttttatttagaaataagataataggttgggtacgggggtttatatttgtaattttaatatttggggaggttgaggtgggcggattatttgaggttaggagtttaagattagttcggttaatatggagaaatttcgtttttattaaaaataaaaaaattagtcgggtgtggttatgtacgtttgtatttttagttattcgggaggttgaggtaggaagatcgtttgaaattaggaggtagaggttgttttgagttaagattacgttattgtattttcgtttgggtaatagagtaagattttattttaaaaaaaaaagaaagaagataataagttatttaaatattatagatattttttatgagtttttgtattgaagttgtattagttattttaatttatatattaaaaagagtataattggattttatataaaaatttttatttgagtcgggcgcggtggtttatgtttgtaattttagtattttgggaggttaaagcgggtagattatttgaggttaggaaatcgagattattttggttaatatggtgaaattttgtttttattaaaaatataaaaaattgtagggcgcggtggtttacgtttgtaattttagtattttggaaggttgaggtaggcggtttatttgagatcgagagttttgatattagtttgattaatatggagaaattttatttttattaaaaatataaaattagttaggtgtggtggtatatgtttatagttttagttattcgggaggttgaggtaggagaattttttttgaatttgtgaggaggaggttgtagttagttgagatcgcgttattgtattttagtttgggtgataaagtgagatttcgtttaaaaaaaaaataaaaaaaaaataaaaatttttatttaagtaattaattataagttattaagttagtatgtttagttttgttttatagtattttggtatagtataataataggtttagttgttttgttaatttattttaatatagtagaaataaaagttagtttgttattgtttttgttattattattataagtgaaaaggaaaaaatatttttaggtttttgtttttttttttatttattttttaatttttttttttttttttagtggttttttttatttattgtttttttagttttattgttttgaatagtttatatttttataataaatttttttagaaatttattattttaaattgaagtatttttttttttattaacgtacggacgttattaataattgattttaataaaataatttgatataacgtttaggtgtattttgggtttgtttttttggaagtttatagtttgtatttatttttttttttatatgttttaaattttttttttttatattttttgttatagttataagttttaaaatttaaggatgatttataaaatttggtattttcgaagtgcgtttttcgaaataaaggataggaaaatattaagaggggttattaatttaataatagggtaattagaagttaagtttaaagtgtattagtttgttttaaaattataaacgatttgttttgaaagaaatttaaaatgaattgtgtttttggatgtgaatagatgatttttggaatgaatgaaaagtaagaaaatagtaatatagtattttttgaaaaaaggtttttttttttattttaagtttttatatattttttaatttcgtatgttttgtatatataattttaaattaagtggtttttttatttagttaacggtattattaagataatattacgtatatttttttatttatattttaaataatttttaaaaggtttcgggggagagcggtaaagaaatatacggtttgcggaaaaggagaaggtttgattggtacgttagggaattcggcggttttcgtcgttgtgggtatgcgttgtatatgtttttgttcgggtaaagaggcgtgttcgcgttattgagtgacgcggttcgttaagtcgtagtttttaagtgagttcggttcgatttttttcgtattagtttttaattatttttttgatagtattagttggtcgttggataatttttttcgtcgcgatgcggtttattattgtttcgtttagtcgtcgaataatttttgttacgaacgatattttggcgttagaagagttaaggaaacgtttagatgtttaacggaagtgtttttagttaattattttagtgtttcgtgtttacgttttttttttagttgtagtttacgttatttagttttattttttagcggtagttattgattggatagtttgaatgttagttaaattttttaattttgtgggttgttgggttttttcgtttttttttgaagcggttattgttcgttatttagaaggatatgcgtttgcgcgttagagatcgttgttcgttttttttattggttcgtttttaggagttcggggaatacgaaatatttagttaataggagtagagatgtcggaatcgggtttgtgtgtttttgttgaggtgatttggcgtagagcggaggaggtgtttggcgttttttaggttttttttttttttttgcggtttttttaacgttggttttgtttttgtggtttttcgtagaatgtggatgacgtttaaaagaagtaagatggaagtcgacgaggttttagtttttcggttcgagtggatttagcgttatttggtggtggagttttcggagggcgatggggttttgtgtttggtttgtcgtcgttttatcgtagttattcgcgaacgcgacgttaggcgttattacgaggttgagtacgaatattacgagcggtatgtggcggacggcgagcgcgcggttttggtggagcgtttgcgttagggcgatttgttcgtggttttttttatttttgaagagagagttgttcgtgtaggtttcgggttttgtcgttttttggttttgaagggtcgcggttggggtgagggggattttgtatattagtgtatggaggtgttgttgagagaggtattgttcgagtatgtaagcgttttgtaaggcgttgatttatttttagatattataaggtagaggattttgagtattgataggaatttacgtaattagttttttaatcgagttagggattttaaagtttatttttttgttttggacgattaggtttttgtggtttatgagaattattttttggtttttattcgcggtgtaggttttgagttggaggtgtaagaagattttttgattataattaatttgatttattattttagtgttggtgcgtttatgtcggtaattttagagtttttgtagatagtagggtttagtttgtagagaatggttggattgattacgatttatattttgaggatgattggtgagaatttaggattcgttttatatatgagagaaaaggtcgtaagttttaattgttggaatgttatttattatttaggatttttttatttggaattgttgagtttttatgatgtagatgttaattagattataaatattatattcgaatggatagttttgattaagattagaggcgttaggcgatttgaattttagattttattaacggaatttgaattagagtatggtgaaagggttaatggacgatgtttgaataattggtttaggagagggaaaattttaaaattaatattttttttaagaaaagaaatggaagcgtttttggttttagtaggggtaataatagtttattttttagataaataatggttttgtgattttggttttttggtggatattatggaatattttcgagaatttagtgaagaattacgagttagtaaagtttttgttgttgttgtttttgattatatttgtattttcgaagttaagttgaatttattttaaagatatattgaggaaaaaaatttaatagatttttttgtttttagagaagttgttgatgagttaaaatagtaaaataaggaagatgaaaaaatatttgattttgataggtattaaatggtgatttgtcgtttttaaaaagaatttgagagatattttaaggattttaggtttattaaaaaggatttagaattttttttaaatttatttaattttaaatttgaatatgtatttattttagtgagggtggagttaataaaattttaggtaaatattaatttttggaatgaatatagaattaaagatttggggtagttttatgttggattgtttgttgaattttatttaattattaaaggggttgtttgtaaggtggtatttttgtttgatagtaattaaatttgtgaaaaggtttttttatatttgattcgaaattaatatattttgagttagttattaatagatgagtatttttaagttttgtttcgggttgttataattgaaatggagttcggttgggatgattttgtgagagaaagaaatgaatttaatttataaggttttgtagtataagattgaaaaatttaataagaatttaattttaaaagtaaaaattggtttgagtttttaagtttattaatttggattgtgagaaagtattaagtattagtcgtttaaattgattataattaaaattttgatagttgtttttttttttattttaaatggtagtatgggattgaaatatgagaatgttattttttttaaaatttagtttagtgataaagttattgttttttatgatatagttaattttaaagagatttagtattaatgtgagttgaatttgtagtttgttttttaggtgttttgaagataaatgttaaaaattttagtttttattttaatggagtgttaaaattttgatttatatagttttaaattattaattttttaaatgtgtttttgaattaatttgtagaagtttatatagtaagtttataagtttttaaaaaggaagtttatatataatagtggaggtgttttgtttaattattaaaatgtttgagatttttttttaaatatttttgagttcgaaggtaatattgatagatttttttttttttttttttttattatttattttagtgataatatattattgatagaggaagttattagaattatttttaagttttagatataggagattttatgtaatttggagataagattaattattgggggttttttttggattttttttttaataattgggggttattttattagtttgtttattaaaggattatggtaagtatagaattttaatggttgttagttagtaattttttttttttttttttttattgtagatataagtttggttttattaaaaacgatgaggaaaaaagattgtattttaggattaggaggtgtgagatattttagtttttttgttttatttgcgtgggtattgttgttttattttaaaaaattttgtttaaagtaaatattttgttttaaaatgatatagtattagattttgttagatgttagaaatggatttattttaaaatttggaattgtcgtatatattttatatgtaagatagtatataagtagaaatatttaaaagtagttttatttatagattgtagtaattttgtatttttattaagataatttgttttgtgttaaaatagtaatttttaaatttttgtttattatgaaaaggtaattttaaagtttattatgtaaaattaattataaataggatttaatttatatttatagatttttttaagtattatataatttaaaaatttttgttttaaagttttgttttaattattgaaatattttaatttgtggttattaatttagtaaatttaaggaattaggttatgattaagaatttaggtggaattgatgtttgggtaattaaaataaatggtataagagtttaaaaattaaagttgtgttagtggtttttaattagaggtagtaatttgttattttagaggatgttgagaaatgtgtaggggtatttttttggttgttatatttattaggggtttttgttggtatttaagtttaaagatatttatttttgtagtgtatgggatagtttggtataatgaagaattagtttttttaaaatgtagattattttattttaagggatagggtagattattattagaagtaaaattaaaagtataagttgggtaaattgatagaatattagataggagagattaattttaattttttaaatttggttagtaaagtgtaataaaggtattgataagttttgttagtttattatagtatttgtaaattaggaattaataattgaattagatttaagggttttgttttgttatatatatttaaggtagaaaaaaagttatatgtcgattaggtatttattaagaatggttaagttgagattttggttaatagagtaagtttatatatttagagaaataatatagtggaaaatcgaaaaaaaaaaatagaaaaatttatcggtaattttttaatagttttgaatatttatagtagagttttattatttgagagaaagattggaagatttgaaagttatttttgttttttaattttagttttttaaatattgaaattttgtatattttgtgaaattttagtatgttttgtttaaggtgttaataaaattagtttgtattatgtagttattgagtgagggggagatataagttaaggattttaaattgatttttagttatagagaatttgttataagttagttttgtttgtaaaaaaaaaaaaaaaaaaagaaaaagaaaaaagtgtattttattgttttttgtattaagtaattttgtaattgtatggtagtttttttttttttaaataaatatagttgttattggttttgttgtagtagtgaatatagttaaaatacgtatattaaaaaaaaaattattaggtttttattagttattgttttatagtttatttttattagtttttttgatagatttgtatttttagtgtttcgtattgttatttaaattgttttattatgttaagtttttgttaatagttttattttttttgaaatatttgaatatttgatgattttagttttgaggagatattatttttaggtgtgtttttttagtttttgtaggtattttttttttttaatatttgtttttcgtatttttaaaaaaatttgttttagattgttttgttttgtgttagttcgttagttgattttatttttttttatgg

SEQ ID NO: 59 - DNA, 1092 bp, Artificial Sequence
  chemically treated genomic DNA (Homo sapiens)
aagttttttttttattatttaagaaggtatttaggtttttttgtgttaggttttaggtaaagtgttggattatttagtaattgggtttagtagtaggatggttttagattgaggttttagggttaaaggattatttttttttttagcgttggttcgggaaaggtaagtttcgggcgggagcgtacgtcgcgttttcgaagtttggttttttcgttacgtttattttttgtttttatttcgcgtttttttaggttttttttcggtgaatcggatgttttgttagttttttattttgcgttttcggtcgcggttcgggtttttcgtaaagtcgttgttatttcggagggtttagttagcgggttttcggaggttggtcgggtaggcgtggtgcgcggtaggagttgggcgcgtacggttatcgcgcgtggaggagatattgttttgtcgcgatgggggttcggggcgtttttttacgtcgtaggtaagcggggcggcggttgcggtatttgtttatcgggagttttttttttttttttttgttgttgttgttttgtatttagttcgggggaggatagaagaaaaaggaggtagaatggatttttttggtttttttttgtggtcgggggcgggttagggtgggtcgcgttgtttaggtagttttgtcgtgttgttaggtagtttggtcgtcggcgtgggcgatgtcggcgttggggcgggagtcgcgagggtgggaggttttggggcgttttcgggacgtggagttagtagggttttgatttgaaaaacgacggtaaagcgtgtttttgattgtttttgagtattttatattttttagatttagggcgtttttatttttagttggaagtttagtttagagtaatggtgttattaaaaggggtgtgttggatgtgaaaatattttttggaagtatttataagtttgtaggaaatatgttttttttatttttttattttgttttttttattatttattttaagaagtaatagaatttgtgtagagtgtgttttaagttatattgtatgtttatttttgtttatgttgaattcggtgtatatttgtgagaataagttt

SEQ ID NO: 60 - DNA, 1092 bp, Artificial Sequence
  chemically treated genomic DNA (Homo sapiens)
aagtttatttttataagtatatatcgagtttaatataaataaaaataaatatatagtgtaatttaaaatatattttgtataggttttgttgttttttgaaatgggtaatgaagggagtagagtaagaaaataaggaaaatatattttttgtaggtttataaatatttttaaagggtatttttatatttaatatattttttttagtggtattattgttttaagttgggtttttagttgggaataaaggcgttttgggtttgaaaggtgtgaggtgtttagaagtagttaagaatacgttttgtcgtcgttttttaagttagaattttgttaattttacgtttcggaaacgttttagggttttttattttcgcggttttcgttttagcgtcggtatcgtttacgtcggcgattaggttgtttagtaatacggtagggttgtttgggtaacgcggtttattttggttcgttttcgattataggggaaggttaaggggatttattttatttttttttttttttgttttttttcgagttggatgtagagtagtagtagtaggagaaggaagggaaagttttcggtgggtaggtatcgtagtcgtcgtttcgtttgtttacggcgtgaaggagcgtttcgggtttttatcgcggtagggtagtgttttttttacgcgcggtagtcgtgcgcgtttagtttttatcgcgtattacgtttgttcggttagttttcgggagttcgttggttgggtttttcgggatggtagcggttttgcgagggattcgggtcgcggtcgaggacgtagagtaggagattgatagagtattcggtttatcgggagaagatttggaaaggcgcgggatgggggtaggaagtgggcgtggcgagggagttaggtttcgggggcgcggcgtgcgttttcgttcggagtttgtttttttcggattagcgttgaggagaggagtggttttttggttttgggattttaatttgaggttattttgttattgaatttaattattgggtagtttagtattttatttggggtttagtatagaaagatttgaatgtttttttggatgatgaaggggaagttt

SEQ ID NO: 61 - DNA, 6271 bp, Artificial Sequence
  chemically treated genomic DNA (Homo sapiens)
  unsure (4779): unknown base
agtggtataaatatggtttattgtagtttttattttttgggattaagtaattttttagttttagttttttgagtagttgagatgatagttgtttatcgttatgtttagtaaatttttttattttttgtaaagatacgattttattatgttggttaggttggttttgaatttttgggtttacgcgatttatttgttttagtttttaaagtgttgggattataggtttgagttatggtgttcggttatatttatggatttaattgtttttggaattaatatcgtgtaggaaaggagtaggattgagtagaaaaagttgaattaaatgtagttatagtaaatgttttagttttcggattttaagggagttttggtgttaggagagttttttagagtagttttattttgagttttgtatttgttagttagtgtagacggatttggtgagaggtagttttttttagttgaaggtaatttttggaaagggatttagttgataggtgttgataagtaatgcgtttagtagttgaggaaatgagtattttagttttgaagagtggtgtgttttttggtatgttgggatggttggttgtgttagtggagatgggggtggtgggtagaatgaagggaatattattgtaaaagttttttattttttatttatatttatttatttatttattttttaagataaggtttaattttgatgttcgggttggagtgttggaatgtaatgatattattatagtttattgtagttttgattttttgggtttaagcgatttttttattttagttttttaagtaattggaattataggtatatgttattatgtttagttaattaaaaaaaaaaattttgtagagatgaggtttcgttatgttgtttagggtggtttggaatttttgggtttaagtgatttatttattttggttttttaaagtgttgggatgataggtatgagttacggtttttagtttggaataaaatttttcgaagaaaaaattggtagagtttgttgtttgattaaaaaatagaggttgaatgagagagatgtatttaaaataatacgaaatattaagggttttttgaatattgttggatagtgtaaaatgggggaagttaggatataaatttaattttgttttattgtaaggtttatgtttttttattagattagtgttggttaaattggtgttttatgggttatatttagatagtagacgtattttgtttggttatatagtatttaaaaaatgtaaattggttgttattatgtaaaaattggaagagtttatatgtaagtttagatttttagttttttttgagtaattagaagatttagtaatattgggttaatatttttgtatggtagtaattggagttgagtgatagatattttttaaatggagagagtattttttatttggataaatggaggtgggtatatgttttttaatttattatagtttttatgtattattttttttggtattttttttttgagatggagttattttgtcgtttaggttggattgtagtagtataatttaggtttattgaaattttagttttttgggtttaagtaatttttttgttttagttattttagtaagtagttgggattatagttatgtgttattatgttcggttttttttttttttttttttttttttagtagagatggagttttattatattggttaggttggttttaaatttttgattttaggtgatttgtttgtttcggttttttaaagtgttgggattataggtatgagttatagcgtttagttttttttggtatttttgtttagtatttttgttatatgtattatgtatggtttaataaagtatataatatataataggtatttgggtatttttatttttatttattttttagagatagggttttgttttgttgtttaggttggagtgtagtggcgagattatagtttattgtagttttgatttttttagtttaagtgatttttttattttagttttttaagttgttgggattatagatgtatattattatgtttaattaatttaaataattttttttggtagaagttgggattttattatgttgtttaggttggtttgaatttttaggtttaagtaatttttttatttcggtttttaaaagtgttggtattataggtgtgagttattacgatcggtttatttggatatttaatattggtttagtagaattgaatgaatttaattggagaggaagttggggtgaagtttaggtttttgattataatgagaggtttggtattgaggggaggtaatagaatagggagtataaattaggatgaattaatgatatgttggtaggagtttgagtaaaggaagaagagtagagggttagggtttgaagtttgggtgttttattatagagttaaagaagagtgggtaatggtagattaaattagagaagaagaggagagaaaggtatagaggaattttagtaacggaatgttagggaaggtaagggagttgagggtttgggtagttgtatttagtgtagggaagaagattagggagatagataggtaaaaagttatggtaataaggaagtagttagggatttttagaggaagtatgagaaaaggagaggaaggttataggtttgaagtttagtagtgtagtagggggtattggaatattattttgggggtatgagtgagtgtttttttaggggttttatttgggagaaatatagatagatatttatttaatatttatttatttttttttagtatagttattattttgatattatttaaaagaaattagtatttgtattgtatttttaaagaagaagggataaaagatatgtttaaattgtttgtttgttttagtggaataaaatattaatttaatatgtattttggataattattaatttagagattggaaattttttttaaggatatatttttttgtatgtgggttattggttttgtggtttttttgtaggaaaattaaaattttagttttgtttttttttattatttagtgtttgtgtggtttaattggttgattagcgcgtgtttggaatgtgtaaatttattttaatattggtttaggggtttgtgtggtagtttatttttgttattttagtattttgggaggttaaggtagggggattatttgaggttaggagttttagattagtttgggtaatatagtaagattgtgtttttattaaaaaaaaaaaaaaaaaaaaaattagttaaagtagggtgatatttatttgtagttttagttatttaggagtttgaggtgggaggattatttcggtttaggagtttgaggttggagtgagttatgattgagttattgtattttattgtatagagttagattttgtttttgaaaaataaaaatatttgtttaggtaaaatgtatcgaggaagataaattttaaaattatttattttaggttaggtgcggtggtttatatttgtaattttagtattttgggaggttgaggtgggcggattatgaggttaggagtttaagattagtttggttaatatggtgaaatatcgtttttattaaaaatataaaaattagtcggttgtggtggcgtatgtttgtagttttagttattcgggaggttgaggtagaagaattattttaatcgggaggcggaggttgtagtgagtcgagatcgcgtttttgtattttagtttgggtgatagggtgagattttgttttaaaaaaaaaaaaaaaaaaattagttattttaaagtttaatgttagatatagattattcgttgttttggatgtaattttttttttggaaaattggtataatttaattatatatgaaatttttttaattttggtattggaggtatagggaaggattttgttttaggagatttatagtttatttttattgttttaggagttaaattacgttggtttatattttgattttgttatttgttaatttagattttgggtaaattaaaggtttgagggaggagtgtaggtttttagcgtttttacgggggtggggacgtgacgtatttattagtttatgaagttaatgatatgtattgaaaaggtttgtttaaggatttaaataagacgatgaatatattgaattaataatgaatgtaaggttttaaaggtgttttgagggtggtgaaatttgaattttttattaattgtgtaatagttatattaatttggatggttatgagttttgtagaggaaagttgggtttaaattttaatgttagatttggtggttagattttgattgttatcgggtttagtattgggatttaagcgatttttaaaaaaaaaaaattacggaatttttttttggttttttttttttgttttttagtagtttattaagttacgaagaatttgaaaatcggaggtcgtgtattttattttttttgagagtttaagttgagagtatagtttttttaggagattagcggtagagattcgcgcgttgggagaaaggttagttttagggcgttttaatttttaatttcgggagtaatttaaattcggaggtcggcgggggaggggatagttgtagggggcggtggggatgggagtggatgttttcgggttagttttggtattcgttagttgagtttagcgttagtttaggtgagttttacggcggtgagggacgttcgttagacggtttagaggagttagatgacgttatttttaggaggattcgtttttttattaatgaaatcggtcggcgcgggcgtatgcgcggnaggtcgttttttttttcgtttttttttttttttttttagtcgcgtttttaatttttagttcgttcgcgtttttttttttcgggtcgtggaaaggattttattttcggtggggtgttatggcggcgtttcggattgtgatggttgtggggagacggcgttagtggggagagcgattaagaggttttttttttttttcgggttttttttttttatttttttttttttagtttttttgttaacgttttttttttttttttttttttcgttcggcgttgattttttatttttattttcgtgggaatattgggagtttgtattttatagattttttttttgtttttttttttattttagttttcgtttttcgtttttttttcggtttagggcgtcggtttattttttttttcgtcgtttttcggtcgcggggaggatatggtcgcgtataggtcggtggaatgggtttaggtcgtggttagtcgtttcgacgagtaggtaatcggttcgtggcgggcgggaggtgggagcggagtgggggtggggatagagtaggtgaggggaggtaggagcggtcgtttttttcgcggttgttttaggttttggaggaaaggaagggaagggaagagaagggaaggggggataagtgggggtggttaaggcgggaggtgaggggtaggaggggatagttgggagtttgggtatttttttttttttaagtcggggggtggggttttgtttttgattagttttcgattttttattttttttattttagttttttcgtttggaaatggggatgagtgatttgggggcgtttttaggggcgcgttatttggatttaataattatttttttatttttgtttttgagtagaggtgggtaacgtttaggggttttttttttttttttttttcgtgatttttttaattggggacgagcgaattttaaggtttgttttatatattttttataggagaacgataatatttcgttttttttttagtttttttagtttttttttttggagggggaagagtagaagaaagtaaggaaggtataggtttttttattttttgttttatcgttttattttgtttcgagagttttaagtgtatatttattgtatatttttgtgatgttttataacgtcgttttttatattttgatgatatagattgttttttttttttattgtcgtttgtagtggaaatcgtggttttgaaatattttttttttttttgataattgtagttttttttttttttttttttttttttgttagcggtttgaggatgtgatgtattttcgagtgagaatgttggggagtaaaggggagaagggtgaaaggaaagtgagaaattgttttagagttatcgataatagagtaaagttagttgggatgtggttttggagcggattattttgttagtgtttgtggttgtttttgatttttttttggttgataagagaatttttattgagaatatttgggatg

SEQ ID NO: 62 - DNA, 6271 bp, Artificial Sequence
  chemically treated genomic DNA (Homo sapiens)
  unsure (1493): unknown base
tattttaaatatttttaatgaaagtttttttgttaattaggagagagttaaaaataattataaatattagtagaatgattcgttttaggattatattttagttggttttgttttgttgtcggtggttttgaagtagttttttattttttttttattttttttttttttattttttaatatttttattcgagaatgtattatatttttagatcgttggtaaaaaaaaaaggggggggggaagagattgtaattattaaggaaggggaaggtattttagaattacggtttttattgtaaacggtaataaaaaaaaaaggtagtttgtgttattaggatatgggggacgacgttgtagggtattataaagatgtgtagtgagtgtgtatttgaagttttcggggtaggatgagacgatggagtagaaagtaagaaaatttgtgttttttttgtttttttttgtttttttttttttaggagaggaagttgaagaaattgggggaggggcggaatgttatcgtttttttatagagggtatataagataggttttagggttcgttcgtttttagttaggagggttacggagggaagaggaagagagaatttttaaacgttatttatttttgtttaaaaataaaagtaagggggtaattattaaatttagatggcgcgtttttaaaggcgtttttaggttatttatttttatttttaagcggaagggttgggataaaggggatggagggtcggaggttggttagggataaggttttatttttcgatttaggagggaaagggtgtttaagtttttagttgtttttttttattttttatttttcgttttggttatttttatttatttttttttttttttttttttttttttttttttttttttagagtttgaggtagtcgcgggggaggcggtcgtttttatttttttttatttattttgtttttatttttatttcgtttttatttttcgttcgttacgggtcggttatttgttcgtcgaagcggttgattacggtttggatttattttatcggtttgtgcgcggttatgtttttttcgcggtcggggggcggcggagggaagggtgggtcggcgttttgggtcgggaagagggcggggagcggaggttgaggtgagggaagaggtaaggagagggtttgtggagtgtaggtttttagtgtttttacgggggtggggatggggggttagcgtcgagcgggagggggagagggaaagggggcgttggtaaggaggttggggggagggggataggggaaggggattcggggaggggagggggttttttggtcgttttttttattagcgtcgtttttttatagttattatagttcgagacgtcgttatgatattttatcggaagtgggattttttttacggttcggggagagggagcgcgagcgagttagagattgagagcgcggttgggaaaggggagggggaagcgagagggaaggcggtttntcgcgtatgcgttcgcgtcggtcggttttattaatgaaaaagcgagtttttttggaggtgacgttatttaatttttttgggtcgtttggcgagcgttttttatcgtcgtggggtttatttagattggcgttgggtttagttggcgagtgttagagttgattcgggagtatttatttttatttttatcgttttttatagttgttttttttttcgtcggttttcgggtttggattgttttcggagttggaagttagggcgttttggggttagttttttttttagcgcgcggatttttgtcgttaattttttggggaggttgtgtttttagtttaagtttttagaaaaaataaggtatacgattttcgatttttaggtttttcgtagtttggtagattgttgagaaataaaaaaggaaggttaaagagagatttcgtgattttttttttttagaggtcgtttaaattttaatgttagattcggtggtaattaaggtttagttattaggtttagtattgggatttaagtttagtttttttttgtaaaatttatagttatttaagttaatataattattgtatagttgatgagagatttaagttttattatttttaaaatatttttaaggttttgtatttattattaatttaatatatttatcgttttatttaaatttttgaataaatttttttaatatatattattaattttatgaattgatgaatacgttacgtttttattttcgtgggaacgttgggagtttgtattttttttttagatttttgatttgtttaaggtttgagttgataggtggtaaagttaggatgtaaattaacgtggtttaatttttagaataatagaggtagattatgggttttttaaaataaagtttttttttatatttttaatattagagttgaaaggattttatgtgtaattgggttgtgttagttttttaggaagaggattatatttaaaataacggataatttatgtttgatattggattttggaatgattaatttttttttttttttttttaagatagagttttattttgttatttaggttggagtgtagaggcgcgatttcggtttattgtaattttcgtttttcggttgaagtgatttttttgttttagtttttcgagtagttgggattataggtatgcgttattatagtcggttaatttttgtatttttagtagagacggtgttttattatattggttaggttggttttgaatttttgattttatgattcgtttattttagttttttaaagtattgggattataggtgtgagttatcgtatttggtttggaatgagtaattttaaaatttgtttttttcgatatattttatttaggtaaatgtttttgttttttagagataaggtttgattttgtgtagtggagtgtagtggtttaattatagtttattttagttttagatttttgggtcgaagtgatttttttattttaagtttttgaatagttgggattataggtgagtgttattttgttttggttaattttttttttttttttttttttggtagagatatagttttgttatgttgtttaggttggtttggaatttttggttttaagtgatttttttgttttggttttttaaagtgttgggatgataggggtgagttattatataggtttttaggttaatgttaaaatgaatttatatattttaagtacgcgttaattagttagttaagttatatagatattgggtgataagggagaataaaattagaattttaatttttttatagaaaagttataaagttagtagtttatatatagagagatatatttttgagaaaagtttttaatttttaggttggtggttgtttaaaatatatattaaattaatgttttattttattagaatagatagatagtttggatatgttttttgtttttttttttttaaggatgtaatgtagatattaattttttttagatgatgttagaatgatgattatgttggaaagaaatggatgaatattaaatgaatgtttatttatgttttttttaagtaggatttttgaaaaagtatttatttatatttttaagatagtattttagtgttttttattgtattgttaaattttagatttatgattttttttttttttttttatattttttttgaaagtttttaattatttttttgttgttatggttttttgtttgtttatttttttgatttttttttttatattggatgtaattgtttaaatttttagtttttttgttttttttggtatttcgttgttgaagtttttttgtgttttttttttttttttttttttagtttagtttattattgtttatttttttttagttttgtggtaagatatttaaattttaggttttggttttttgtttttttttttttatttaagtttttgttagtatgttattaatttattttaatttgtattttttgttttgttgtttttttttagtgttaaattttttattatagttagaggtttagattttattttaattttttttttaattaaatttatttagttttgttgaattagtattaagtgtttaaatgggtcggtcgtggtggtttatatttataatgttagtatttttagaggtcgaggtgggaggattgtttgagtttagaagtttagattagtttgggtaatatagtgagattttagtttttattaaaaaaaattatttaaattagttaggtatagtggtgtgtatttgtggttttagtaatttgggaggttgaggtgggaggattatttgagttagagaggttaaggttgtagtgagttgtgatttcgttattgtattttagtttaggtaatagagtaagattttgtttttaaaaaataaataaaaataaaagtatttaaatgtttgttatgtattatgtattttgttagattatatatagtatatatggtaggaatgttaaataaaagtgttaaagaagattggacgttgtggtttatgtttgtaattttagtattttgggaggtcgaggtaggtagattatttgaggttaggagtttgagattagtttggttaatgtggtgaaattttatttttattaaaaaaaaaaaaaaaaaaaaaaaaagtcgggtatggtggtatatggttgtaattttaattatttattagggtgattgaggtaggagaattgtttgaatttaggaggttgaggttttagtgagtttagattgtgttgttgtaatttagtttgggcgatagagtgattttattttaaaaaaaaaatgttaaagaaggtaatgtatagagattgtggtgaattaagaagtatatatttatttttatttatttagataagagatattttttttatttaaagagtatttgttatttaattttagttattgttatgtaggaatgttgatttagtgttgttagattttttagttatttaagagaagttagagatttgaatttatatgtaaatttttttaatttttatatagtggtagttaatttatattttttaaatgttgtgtagttaaataaaatacgtttgttgtttgaatgtagtttatggaatattagtttgattagtattagtttagtgaaaaggtatgagttttatagtagaatagaattagatttgtattttaattttttttattttgtattgtttaatagtatttagggaatttttagtgtttcgtattgttttaaatgtattttttttatttagtttttgttttttggttaggtaataagttttgttaatttttttttcgaagagttttgttttaagttgggagtcgtggtttatgtttgttattttagtattttgggaggttaaggtgggtggattatttgagtttaggagttttagattattttgggtaatatggcgaaattttatttttataaaatttttttttttaattagttgggtatggtggtatgtgtttgtggttttagttatttgggaagttgaagtgggaggatcgtttgagtttaggaggttaaggttatagtgagttgtgatggtgttattgtattttagtattttagttcgggtattagagttagattttgttttaaaaaataaataaatgaataaatataaataaaaaataaaaagtttttatagtagtattttttttattttgtttattatttttatttttattggtataattaattattttagtatattaaagagtatattattttttaggattaaggtgtttatttttttagttgttgggcgtattatttgttaatatttattagttaaatttttttttaggagttgtttttagttgaagaaagttgttttttattaggttcgtttgtattgattggtagatgtagggtttagggtggggttgttttgaagggtttttttggtattagagtttttttaggattcggaagttgaggtatttgttgtaattatatttagtttaattttttttgtttaattttattttttttttgtacggtgttgattttaagggtaattaaatttatgagtgtggtcggatattatggtttagatttgtaattttagtattttaggagttgaggtaggtggatcgcgtgagtttaagagtttaagattagtttgattaatatggtaaaatcgtatttttataaaaaataaaaaaatttgttggatatggcggtgagtagttgttattttagttatttaggaggttgaagttggaggattgtttgattttaggaggtagaggttgtagtgagttatgtttgtattatt

SEQ ID NO: 63 - DNA, 4501 bp, Artificial Sequence
  chemically treated genomic DNA (Homo sapiens)
atatatttgtaagaaaagttagattagagtgaagtaaagttaggatttgatggtggcgggaagggaaggggttaatgttgttgttggatagaggggtgttattttttttagaagaatagtatgtcgtggttattattataataatagttgatataattattatgggttggggatttataagagtttttataatttttaggtaggaggtattacgaattttattttataattgaggaaattgaggtataaagaaacgaagtagtgatagtagtttttttttttttttttaatagtttggaattaagttgtttgagtcgaggttgggttttaggaggtgtggatagtatttttatttcggtaaattagattcgtttgtttataattggggagaatggtggttttgaaaaggttaatttgggagttttggggacggttgtagggaacgtacgtttattttttttaggaagtagagttaggtcgttttttttttcgtagtggtgaggacgcgtggatagtttcgcgggggcggcgggagatttgcggagtggtcgtattttaggttcgcgttaaggtcgggtagtttcgttttttgtttagttttcgcgaggtgtcgttttcggtcgaagaaattatcgcggcgttattttcgtagttcgtatttatttatttatttatttttaaataaggggggcgtttttttttttttaatttgaaattggaaatatttagaggttttgtttttaagggggcgcgttttttttttgttattttgtattttcggattagttttttttcgtaattatataggagtaatttttttgtaaggttttgtttaacgttggtttcgcgtttagttgtataatacgtagttaaagcgggggttgggttagaagtatcggttttttttttttaatatatattttcggagtttttcgtaattttttttttttttaatgataagtaattgttaggttcgtagggtgggtgttgtattgtatcgtttcgcgcgtagttggtttttagagtgtagtcggtgtaagttcgggggtttaaaagggcgggaggagtatattttgggttttttagttttgtagttttttttttgtaaagaaaagtaagtggtttttggcgcgaaagttttggcgttttttttgatttttatggaaattaggagggcggggtaaagtcgtttttttttttttttttttttttttttgtttgcgttatagttttttttttttttcgtttttcgggtgtgttagattttttagttaataatatttttcgagttttaaagcgtaggttgtgatagttatttgtttggacgcgttgggtggatgcggggggtttttgggaattgtgttggagtcgagtaagcgttagttaggcgtaagcgcgtatagattgtagttattcgaggatattttcgttttttcggtttattcggagatattcgcgtagaatcgttttcggattttttgtagtcggcgggaggtaaggagtagggtttgtaaatcgttcggcgtttagggaagcgacgagcgtcggggtaaggtaagttttggacgggattgcgacgtgcgtatcgggcgttttaatatgttcgggggattgtttttgttttcgaaataaaattatttttgggtttttttagaaaagttagttttagtttcgaaggtattttggttagaggagattcgttttaatttttttgtagtttttatcggggggagtaatggtttttgcgaaaagaaattttttcggttttagaagatttgtttgtgtttgagttgtcggagagtcggtgcgtttttattttaggttggggtttttttttaaagggtgtttttggaggaagaagagggggggattaggtagggcgaggtcgtcgcggtcgtaatttgggttacggttgttttagtttggaggagaggcggttttttcggcgatttttttcgcgcgggcgtttttgttattttcgggaataggggtttagtttttttttttttggaagaggacgttgtcgtgggtttggaagagtaggggtgggtttagagagtttttaattaagttattggtaggagtatttttgtagcgggtgaatgtcgaggggcgtttgtttaaatttggggaggggaaggatttgtggatatgggtgtttgttgttggtttttgtttagagaaaggtttttttttatttgtaaagttttttaaattttttgttattatttgtatttttgaggttgtatttttataaagggggtagaaggtattttaaatattattttcggtagttgggtcggagagtttggggttttttttgagtagtcggttttatatcgttgcgagtgcggttgtttgcgtgttcgtgagagttagaattttgtagttaggaatagtttttttttttaggtagtgttttgtgtgaatgaaatggtagtttttaaagttgcggagtttcgttattattttttgtatttgtatgtttttttttattttttgtcgtagatagtttgtatataaaaggagggcgggagggagggagcgagaggtataattttttttattttcgggagtagtgggtagagtggggggtttggagggaagattggggaatttggttagagggggcgtttattgtttattttttcggtttgtttcgtttgtttatttttttcggtgtgtttgtcggttgtagtgttggaggtcggcgtcggttttcgtttttcgcgttttttacgggaaggaagtattttcggtattaaaacgaacggggcggaaagaagtttttagtcgtcggtcgggaggcgagtcgatgtcgagttgttttacgtttattatgtcgggtatgatttgtaagaatttagatttcgagtttgattcgttatagttttgtttttattcggacgaagatgatttttatttcggcggtttcgattcgattttttcgggggaggatatttggaagaagtttgagttgttgtttacgttttcgttgtcgtttagtcgtggtttcgcggagtatagtttcgagttttcgagttgggttacggagatgttgtttgagaacgagttgtggggtagttcggtcgaggaggacgcgttcggtttggggggattgggtggttttatttttaattcggttattttttaggattgtatgtggagcggttttttcgttcgcgagaagttggagcgcgtcgtgagcgagaagttgtagtacggtcgcgggtcgttaatcgtcggttttatcgtttagttttcgggagtcggcgtcgttagttttgcgggtcgcgggtacggcggggttgcgggagtcggtcgcgtcggggtcgttttgttcgtcgagttcgtttattcggtcgtcgagtgcgtggatttcgtcgtggtttttttttttttcgtgaataagcgcgagttagcgttcgtgttcgtagtttcggttagtgtttcggcggcgggttttgcggtcgtttcgggggcgggtattgtcgttttagtcggggtttcgggggtcgttttttcgcgtttaggcggtcgttagattagcggcggcgattataaggtttttagtattttcggagaggatattttgagcgatttaggtaaagatcgaattcgggttcggttgtttttttggggtattggatttcgggtcgcgttttttttgttagtgttcgtatgttttggtttggggagtattttggaggtagtgttaggggtagagaggttttgttttttttaagttttttttcggggtaaagagaaggggttgagagaatgtcgttgtaaaaggggtgttttttaattttcgtttttattaaagttttttttatttttttttggggagtttttttttaggttattacgggtttttattcggttttttattttttttttgtagcgtagtttgaggaataaaattggagaaagttggtggttaaatcgggtgggggtttagggggttgttgggtgtattgtttggatagaaatttgttagcgtaggggtgaaagggattttttggtttaggttaggggagggaaagatattttcgagaagatttaagggttgtgtaaagttttgtttaaggcgtaggaatttataggagggttgtaatagatggttagagtcgattttttattttttttttttttttttttttttttttaaatgtcggtatttttttttttttttattttcggtgggtggtgggttatttgtttttggtgcgtggttagtaggcggcgatatgcgaggttagtaggcgggttcgggatttgaaaggttgggggtggtgggggtattttttttttttttatttagtagttggttgtaagtgtaatagtagttgtgtatatttttagggggttttttttttttagtgtgtagtggaaagtggttgtagttttgttttttagtttgaattttaggtttaatttgagatgtgagttgtatttgtaatttagtgtttttgaaggtgagggtaggtatttagtagtt

SEQ ID NO: 64 - DNA, 4501 bp, Artificial Sequence
  chemically treated genomic DNA (Homo sapiens)
ggttgttgagtgtttgtttttatttttaagggtattgggttatagatataatttatattttaaattaggtttggaatttaggttggaagataaaattatagttattttttattgtatattggaaagaggaggttttttgagaatgtatataattgttgttgtatttgtagttagttgttgaatggagggagggagggtgtttttattatttttagttttttagatttcgggttcgtttgttggtttcgtatatcgtcgtttgttggttacgtattaggagtaaatagtttattatttatcgaggatgggggaagggaaaggtatcgatatttgaaaaaaaaaaaaaaaaaagaaaaagaatagaaaatcggttttagttatttgttgtaatttttttataagtttttgcgttttaaatagggttttgtatagtttttgaattttttcggggatgttttttttttttttgatttgggttagagagttttttttatttttgcgttaataggtttttgtttaggtagtgtatttagtaattttttaaatttttattcggtttagttattaattttttttaattttattttttagattgcgttgtaaaagagaggtgggggatcgggtgagggttcgtgatggtttagaggagggttttttaggagagggtggaaggaattttagtgaaggcgagaattggagagtattttttttgtaacggtatttttttagttttttttttttatttcgaggagagatttgggggaaataggatttttttgtttttagtattgtttttaaaatgttttttaggttaagatatacgagtattaataaaggggacgcgattcggggtttagtgttttagggaggtagtcggattcgagttcggtttttatttgaatcgtttagggtgtttttttcggaggtattgagggttttgtggtcgtcgtcgttggtttggcggtcgtttgggcgcggaggggcgattttcggggtttcggttggggcggtaatattcgttttcgaggcgatcgtagggttcgtcgtcggggtattggtcggggttgcgggtacgggcgttggttcgcgtttgtttacgggaaaggggaagattacggcgggatttacgtattcggcggtcgggtgggcgagttcggcgggtagggcggtttcggcgcggtcggttttcgtagtttcgtcgtgttcgcgattcgtagggttggcggcgtcggttttcggggattgggcggtggaatcggcggttggcggttcgcggtcgtgttgtagtttttcgtttacggcgcgttttagtttttcgcgggcggagaagtcgttttatatgtagttttggaggatgatcgggttgggggtgaggttatttagtttttttaggtcgaacgcgtttttttcggtcgggttgttttatagttcgtttttaagtagtattttcgtgatttagttcgggggttcggagttgtgtttcgcgaagttacggttgggcgatagcgggggcgtgggtagtagtttaaattttttttagatgttttttttcgggggggtcgagtcggggtcgtcgaagtagaagttattttcgttcgggtagaagtagggttgtagcgagttaaattcgaggtttgggtttttgtagattatgttcggtatggtggacgtggagtagttcggtatcggttcgtttttcggtcggcgattgagggttttttttcgtttcgttcgttttaatatcgggggtgtttttttttcgtggggggcgcggaaggcgggggtcggcgtcgatttttaatattgtaatcgatagatatatcggagagggtgggtaaacggggtagatcgaggggataggtaatgggcgttttttttaattaggttttttaattttttttttaagttttttattttgtttattgttttcgaaggtggaggaagttgtgtttttcgttttttttttttcgttttttttttgtgtataagttgtttacgatagggggtgggagggggtatgtagatgtagggggtggtggcgaggtttcgtaattttggaaattgttattttatttatataaggtattgtttgggggagggggttgtttttggttgtagaattttagtttttacgagtacgtagataatcgtattcgtagcggtgtggggtcggttgtttaggggaagttttaggtttttcgatttagttatcgggaatggtatttggagtattttttattttttttgtaaaaatgtaattttaggagtgtaaatgatagtaggggatttagaaaattttgtaaataaaaaaaagtttttttttagatagagattaataatagatatttatatttataaattttttttttttttaaatttgagtaaacgtttttcggtatttattcgttgtagggatatttttgttaatagtttaattggaagttttttaagtttatttttgtttttttaaatttacgataacgtttttttttagggagggagaggttgagtttttgttttcgggaatggtaggggcgttcgcgcgaggagggtcgtcgggagagtcgttttttttttaagttggagtagtcgtgatttagattgcgatcgcggcggtttcgttttgtttaattttttttttttttttttttaggggtattttttggagaagaattttagtttggggtggggacgtatcggtttttcgatagtttaaatatagatagattttttagagtcgagggaattttttttcgtagaagttattatttttttcggtaagggttgtaaaaggattagggcgggttttttttagttaggatgttttcggggttggaattggtttttttgggaaaatttagagatggttttgtttcggaagtagaaatagtttttcgggtatattagggcgttcggtgcgtacgtcgtaatttcgtttagggtttgttttgtttcggcgttcgtcgtttttttgggcgtcgggcggtttgtaagttttgttttttatttttcgtcgattgtaggggattcggaggcgattttgcgcgggtgttttcgggtgggtcgggggggcgggggtgttttcggatggttatagtttgtgcgcgtttgcgtttggttagcgtttgttcggttttaatatagtttttaggagtttttcgtatttatttagcgcgtttagatagatgattgttatagtttgcgttttgaagttcgggggatattattaattgaaaaatttgatatattcggggggcggggagagaagggggttgtggcgtagataagggggagggagaaaggagaggaaagcggttttatttcgtttttttgatttttataaaaattaggggaggcgttaaggttttcgcgttaaaagttatttgtttttttttgtagagagaaggttgtaaagttgggaagtttagggtgtgtttttttcgtttttttggattttcgggtttgtatcggttgtattttgagaattagttgcgcgcggagcggtgtaatgtagtatttattttgcgagtttggtaattgtttgttattaaaagaaaaaaaaattacggagggtttcgggggtgtgtgttggggaggggagatcgatgtttttaatttagttttcgttttgattgcgtgttgtgtagttgagcgcgaggttaacgttgagtaaggttttgtagggaggttgtttttgtgtaattacgaaagaaggttagttcgaaggtgtaaaatagtagggagaggacgcgtttttttaggaataagatttttggatgtttttagttttaaattgaaagaagaggggcgttttttttgtttgaaaataaataaataaataagtgcgagttacgagggtggcgtcgcggtggttttttcggtcgaaggcgatatttcgcggagattgagtagaaagcggagttgttcggttttggcgcggatttggagtgcggttatttcgtaggtttttcgtcgttttcgcgggattgtttacgcgtttttattattgcggaggaggaggcggtttggttttgttttttagggggaatgggcgtacgttttttgtagtcgtttttagggtttttaagttaatttttttaaagttattattttttttagttatgggtaggcgaatttgatttatcgagatggaagtgttgtttatattttttgagatttagtttcggtttaaatagtttgattttaaattgttgaagggaaaaaggaaagttgttgttattatttcgtttttttgtgttttagtttttttaattgtgaaatggagttcgtagtgttttttatttgagagttatgaaagtttttataagtttttagtttataatagttgtgttagttattattatgatgatgattacgatatgttatttttttggggaaaataatatttttttgtttagtagtagtattggtttttttttttttcgttattattaaattttggttttattttattttggtttagttttttttataggtgtat

SEQ ID NO: 65 - DNA, 6112 bp, Artificial Sequence
  chemically treated genomic DNA (Homo sapiens)
atttataggggtagggttgtagggtatttgtaggagttgggagtttgggggatttggtggagttgggagtaattgttgttaattttttttaagagtttgtttttgaaaaaggtaatggaagggaaggaggtattgaaatggtaggtggtaggttaggcgtggtggtttacgtttgtaattttagtattttgggaggttgaggtaggcgaattaggagattaggagatggagattattttggttaatatagtgaaattttgtttttattaaaaatataaaaaattagttaggcgtggtggtgggtgtttggagttttagttattcgggagggaggttgaggtaggggaatcgtttgaatataggaggcggagtttgtagtgagtcgagattacgttattgtattttagtttgggtaatagagtaagattttgttttaaaaataaataaataaaaaatataaaaagtagttgggcgtggtagtaaacgtttgtagttttagttatttaagggattgaggtgggaggattatttgagtttgggatgtcgaggttgtagtgagttgtgttaatattattggattttagtttggttaatagagtgagtttaaaaatatatatttatatttttatatatttatatattaaaaaatataaaaaagtggcgagtgatagttgaggagattattgtagtgggaattttaggagggggtgaggaggggttcgttggtataggggaaggggtgttatagagaaagattttggtttttttggggttttggagtggtagagagagtttaggatgtttgtaaatgtatagaaattagagggtgggaatttttttgggaggtttgtttttttttatgaaggagaagatagagtaattttgttgatagggagggtagagaaggagaggtgaggggtttgagggaagaggtttggtatagaggttggggagagggaaatgagagcgtttaggagtttttggaagatgatttgggttagtagttggggttgttattagggtagttgttgggagggtagggtatttggaggttttaaatttgtattattatagatttttttttagtagggtttaattttttggatggagaggtttgggaggtgtagtagggaagttggggatgacgttgatttggggtttataatatttttttttagtaggtttaggggtttgtagttgttggtaacgggttgattttatttttgggtgaataggtgaagtttttcgggttgtttcgggaagataaaggttgggttttttggtttcggtttttgggattttgagatatagatgttttttttgggaaaggttcgttaatatattaagtaaggtttggtaagggaggaagagtttagggtttttttttgatatttgggggaaagtgttggggaagatttgggtagtatttaaaggttttagtgaatttaaagatagaaggaagatagaaggaggttggattggtaaagggaattttatagtagatattttaggtttttatatttagtagatttggagttttggaagttgaggttgtgaattttttttcggttagttggggtgtttagttttgttttgttcggtttatatggtagggatttattttgtaggttttgtgggttgggtgttggttgggtttggttagttttatttgtaatttagggggaggagtaggggagatataggatgtttttaattttttgattttttgaagtttttttggtattagttcgggtttttattatagtttttagtggaagagtttggaaggggggtagttgttttttgtttagttttttcggttttttagtaattttattttttatgttattacgtttttgcgttaagtttttttttttttaaatatttaatgtgattttttttggttagttggagtttaattgagatatttattttttagaagtttagttttgggaagtggagttaatttttggaagtttgtagattttttttagtgggttgttagattttagtatgagtatgaggtttattatggtttattgggttttaggggttagaagtgtttatgggtgttttaagtgggtgttttattatataggttttatggggggtagttagattatagtagtagatagagttgggtcgggtttatgtaggtttaaagaagtagttagtggttatttaaggtagtggtatttttgtagttttttggttggtgtttgagattagttatattttttataataattagagttatgtttatattttttattattatttagttttttttttgttaaaacgtggagtattgttttttagttttggagtttaggggtagtagataatttgagttagttggagtaggtggggtcgtttttggttggaacggttatggaaaattttaattaaagatagtatttgggagaatatttatgaaaatgtgaaagtttatatttttgatttagttgttttatagatatgatttgtgtaaaataacgtaagtgagaatatttgttatagtagtttgtaatggttaaatatagtaaaaaattttaattatttagtaatggtgattagataaattgtgatttttttatataaggaatgttatgtagttattaaaaagaatgaggtagttttatatgtgttgatgtaggatgagttataagatatatatagttaatataaaagaagagtttagaatagtgtatatgatagcgtttgtattaaatataataaatatatttgtttatttgtacgtacggttgaatttggaaggatatataagagattgttattgttttgagattgggaggtttaggggataggaacgggagggagattttttattgtgtatttgtttgaattttttgaattttgtattatgtgtatattttataatttaataaatatttatgtttttaaaagaaaataaaaaagtatttagaaataaataggttagacgtggtggtttatttttgggaggttgaggagggaggattgatatagttggggatgttaaggttgtagtgagttatgattttgttattgtattttagtttgggtgatagagtgagattttgttttaaaaaaaagaaattgggatgatatagtagtgtttttatttatattttacgtttttattgttagttatgcgatttttggataagttaatttatttttatgttttagtttttgtaaaatagtggtaattttttggaaaggttattttgaagagtaagttaattaatatgtaaagagttggaagagcgtttggtattgaattagtattatgaagtgttagatattgttattttgttgttttagattaattttaaagtaacgttatttgagttatgtcggttttttttgttgttgtttttatttaaatattttatttatttaataaataattttatttttttttttttttttttttttgagatggggtttcgtttttgttttttaggttggagtttaatgacgcgatttcggtttattgtaattttcgttttttgggtttaagcgatttttttattttagtttttcgagtagttgggattttaggcgagcgttattatgttcgttaattattttttgtgtggagatagggtcgtattatattatttaggtcggttttaagtttttggatttaagcgatttttttgtattagttttttaaagtattgggattataggtatgagttatcgtattcggttttaataaatgtttttttttttgagacggagtttcgttttgtcgtttaggttggagtgtagtgggcgatttcggtttattgtaattttcgttttttcggtttatgcgtttcggttttttaaaatgttgggattgcggatttgagttatcgcgttcggtttgaggtgatttttaataagtatagtcgtagttgtagatattttggttttgtaggaataatgaggtatggatggatttatagttggatttatggatgggatggattttcggtaggttttggacggagggaaatgttttggtttgttaagttcggtatcgagtgagatttatttataaagttaatcgtggaagttattggcggtttttttcgttttgtcgtcggggaattttgtcggtggttttcgatttgttttcgggttatttggtgatattgatttcgtagttattattttaattggcgtattcgatttaaataataattagggaatttgtgggcggttaaaggttcggttttgcggtcggtttttttaggtttttttttttgttttgtgaggttagaaagttattttttcgaggtcgttttttatgtcgagaaatatttttcgtttgaggttttgtggggtaggggaggttcgtgtattttttatagaaaatttcgtatagattcgcgattgtttttattaatagtttttaggagattgtttgtagtcggggggttgtcggttttatgttcgcgggtaagtagggataagttgtgtttttaaaagggttaacgggaatttcgcggtttttgaattttcggtgttggcggatttttcgttttagggttattaggagtcgcggcgtgagtgcgtgtcgggatcgagcgcggggtttttgaggaattttaaggttgtttaagtttacggatttagttatattggcgaatcggagatcgttcgattttattattttcgcgttttttttatagtcggcgttaaaaacgttagttttacgacgtaggtcgggattcgcgcgtttacggtttaattagcgcggattttgtataaagcgagtttcgtttttacggcgtcgttgttagtttttttttttttcgtggtcgtttcggttcgtttatttttcgtttcgcgtcgtttacggttagaggttcgcgattggtttatggggacggtcgcgagttttggttggtcggcgcggagttacgagggcgtcgtcgtcgtttttttataggcgattattgggtaggtttagtttttcgttttagtttcgagttttcgttggttttcgggtgtacgtgtttcgggatttttagtattcgcggtcgttatcgtcgtcgtttggttttttttggatttatttgcgttatttgttcgttttatatttcgtcgttattatggtgaagttcgcgaaggtaaacggttttgagcgcgagcgtagacgtgtaggtttgtttttcgaggggcgagcgcggcgtcgcggggaggagggtttgcgcgtagtttcgggcgcgttttagggcgttatgttgcgggaagtttcgcgcgattagtggggaggtttcgcggtttttggttatttggtggcgaggtgaagagtttttgtaggtgttgggggcggcgaacgcggcgggaaagatagagttattgagcgcggggagggggcgttgggtttcggggtggagagatgagattaaatttttgcgacgcgtacgagttgggattcgatttttgacgtacgtgttcgggagcgcggtttgttacgtgggtcgcgtcgcgtgggttttggaatttttagagggatcgggtgttttgggtcgggaaatggcggtatcggttttagtcggagtttcggttgcgttcggatgttttcgtttcggtttggtaagtcgatacgtggtgggtttcggaaggtggttttgtcgcgtgttttttgcgttgtgtttcgggtacgtggtggtttattaggtatttttacgtggtcgcgtcgtttttttaaggggcggggttgtttcgttgggaaaggtataagttttatgagaaaattaaggtagttatttttttaagtgttttaatgatttttatcgttaatttggatttagatgagggtggtagaataaagtatcgggatttgtagtattaaaatacggttgtgtttaattaaggtaacgggaggagaaattatttttttaggttgattttttattttagggtaggttttttgttggtaaagtttgggaggaaaaatgtgggcggttgagagtagttttttttgtattgttattaggagtagtttttatgttagttgtggtgtttggtattatgagaaatggatttgaggacggagatgatggcgtatgaatattaatggtaaaatatggggattttttagtagatt

SEQ ID NO: 66 - DNA, 6112 bp, Artificial Sequence
  chemically treated genomic DNA (Homo sapiens)
ggtttattagaggatttttatattttgttattagtgtttatacgttattattttcgtttttagatttattttttatagtgttaaatattataattaatatagaaattatttttgatggtaatgtaagagggattatttttaatcgtttatatttttttttttaggttttattaatagaaaatttgttttaaggtaaaaagttaatttgaggaaatgattttttttttcgttattttagttaagtataatcgtgttttaatattataaatttcggtattttattttattatttttatttgaatttaaattaacggtgaagattattaaggtatttaaaaaaatgattattttgatttttttatgaagtttatgttttttttagcgagataatttcgttttttaaagaggcggcgcggttacgtgggggtatttggtaggttattacgtgttcgaaatatagcgtaaaaggtacgcggtagagttatttttcggggtttattacgtgtcggtttgttaggtcggggcggagatattcgagcgtagtcgggatttcgattagggtcgatatcgttatttttcggtttaaggtattcggtttttttggagattttaggatttacgcggcgcggtttacgtggtaggtcgcgttttcgggtacgtgcgttaggagtcgagttttagttcgtacgcgtcgtaaaagtttggttttatttttttatttcgaggtttagcgtttttttttcgcgtttagtgattttgtttttttcgtcgcgttcgtcgtttttagtatttgtagaagttttttatttcgttattaagtagttagaagtcgcgagatttttttattaatcgcgcgagatttttcgtagtatggcgttttagaacgcgttcgggattgcgcgtaggttttttttttcgcggcgtcgcgttcgtttttcggaaagtaggtttatacgtttgcgttcgcgtttaaggtcgtttattttcgcgagttttattatgatggcggcggagtgtgaagcggataagtggcgtagatgagtttagaagaagttaagcgacggcgatggcggtcgcgggtgttgaagatttcggagtacgtatattcgaaggttagcgagagttcgagattgaggcgaaagattgagtttgtttagtaatcgtttgtggaaaggcgacgacggcgttttcgtgatttcgcgtcgattaattaaagttcgcggtcgtttttatgagttaatcgcgagtttttaatcgtgaacggcgcggggcggggagtaggcgggtcgaggcggttacgggagggggaggggttggtaacggcgtcgtgggggcggggttcgttttgtgtaaggttcgcgttgattgggtcgtgggcgcgcgggtttcggtttgcgtcgtgggattggcgtttttggcgtcggttgtgaggggagcgcgggggtggtggaatcgggcggttttcggttcgttaatgtggttgggttcgtaggtttgggtagttttggagttttttagagatttcgcgttcggtttcggtacgtatttacgtcgcggtttttggtggttttggagcgaggagttcgttagtatcggaagtttagggatcgcggagttttcgttggtttttttggaggtatagtttatttttgtttgttcgcgagtatggggtcggtagtttttcggttgtaggtagttttttgagagttgttaataaaggtagtcgcgggtttgtgcgaggttttttgtgagaaatgtacgaattttttttattttatagaattttaagcgggagatatttttcgatatggggaacggtttcggagaagtaattttttggttttatagggtagggagaggggtttgggagggtcgatcgtagagtcgggtttttgatcgtttataggttttttggttattatttgggtcgaatgcgttaattaaggtggtggttgcgaagttagtgttattagatggttcgggagtaggtcgagagttatcggtagggtttttcggcggtagggcgaaggaggtcgttagtgatttttacggttagttttgtgggtgggttttattcgatgtcgggtttagtaaattagagtattttttttcgtttagggtttgtcggggatttattttatttataggtttagttatggatttatttatattttattgtttttatagaattaggatatttgtagttacggttgtatttgttaaaaattattttaggtcgggcgcggtggtttagattcgtaattttagtattttgggaggtcgaggcgtatgaatcggggaggcggaggttgtagtgagtcgagatcgtttattgtattttagtttgggcgatagagcgagatttcgttttagaaagaaaagtatttgttaaggtcgggtgcgatggtttatgtttgtaattttagtattttgggaggttgatgtaggaggatcgtttgagtttaggaatttgagatcggtttgggtaatataatgcgattttgtttttatataaaaaataattagcgggtatggtggcgttcgtttggagttttagttattcgggaggttgaggtgagaggatcgtttgagtttaggaggcggaggttgtagtgagtcgagatcgcgttattgaattttagtttgaggaataagagcgaaattttattttaaaaaaaaaaaaaagaaagaaaataaaattatttgttaaatgaatgaagtatttaggtagaagtagtagtagggagagtcggtatggtttaagtggcgttgttttggagttggtttggggtagtaaaatagtaatatttaatattttataatgttgatttagtgttaggcgtttttttagttttttatatattaattaatttattttttaaaataatttttttaaaaagttattattgttttatagaaattgggatatagaggtaaattaatttgtttaggggtcgtatagttagtagtggaggcgtaggatataagtgaagatattgttgtgttattttagttttttttttttgagatagaattttattttgttatttaggttggagtgtagtggtaggattatggtttattgtagttttgatatttttagttatattaattttttttttttagttttttaaaggtgagttattacgtttggtttgtttgtttttaaatgtttttttgtttttttttgaaaatatgagtatttattgaattgtaaagtatatatatagtgtaaaatttaaaagatttaaatagatgtataataaaaggtttttttttcgtttttgttttttaggttttttagttttaaggtagtggtagttttttgtatatttttttagatttagtcgtacgtgtaaatagataagtatatttgttatatttaatataaacgttattatatatattgttttgagttttttttttgtgttaattatatgtattttgtaatttattttatattagtatatgtagagttgttttattttttttaatagttatatggtattttttgtgtggaaggattataatttatttagttattattgttggatagttagggttttttgttatgtttggttattataaattgttatagtaaatatttttatttacgttattttatataaattatatttgtagaatagttgggttaagggtatggatttttatatttttatagatgtttttttaagtgttgtttttggttggggttttttatggtcgttttagttaagagcgattttatttgttttagttggtttagattatttgttgtttttgagttttaaggttgggagatagtgttttacgttttagtagaggaagaattagatggtggtgagaggtgtgagtatggttttaattattgtggggagtgtgattagttttagatattagttaagaagttgtagggatattattgttttgagtggttattggttgtttttttgggtttgtatggattcggtttaattttgtttgttgttgtggtttggttgttttttatgaaatttgtgtagtgaggtatttatttgggatatttatgggtatttttgatttttgagatttagtaggttatagtgggttttatatttatgttaggatttgatagtttattggagggggtttgtaggtttttaaggattaattttattttttaggattgggtttttaggaaataagtgttttagttaggttttaattagttaagaaaaattatattgagtatttaaaaaagagggagtttagcgtagggacgtggtgatatgagggatagaattgttgagaagtcgaggggattgagtaggaagtagttgttttttttttaggtttttttattgaaggttatgatgagggttcgggttgatgttagggaagttttagaaggttaggaggttggggatattttgtgttttttttgtttttttttttgagttgtaggtagggttggttagatttagttagtatttagtttataaagtttgtagggtgagtttttgttatgtaggtcgagtagggtagggttgggtattttagttggtcgggagggagtttatagttttagtttttagagttttaggtttgttgagtgtgaaggtttggggtgtttgttatgaagttttttttattagtttagtttttttttgttttttttttgtttttgggtttattgaggtttttggatattgtttagattttttttaatatttttttttagatgttaaagggggattttaagtttttttttttttgttaggttttgtttagtgtgttagcgagttttttttagaggaggtatttgtgttttagggttttaggagtcggagttagagaatttagtttttgttttttcgaggtagttcgagaagttttatttgtttatttagaggtagagttagttcgttgttaataattgtaggtttttgagtttgttggaggagggtgttgtgggttttagattaacgttatttttaatttttttgttgtattttttaggtttttttatttaggaggttgggttttgttggagagaaatttgtgatgatgtagatttggggtttttaaatgttttgtttttttagtagttgttttggtagtagttttagttgttagtttagattattttttaggagtttttgaacgtttttatttttttttttttagtttttatgttaagtttttttttttaggttttttatttttttttttttgttttttttgttaatagagttattttatttttttttttatagggaaggataaattttttagagggatttttattttttgatttttatatatttgtagatattttgagttttttttgttattttaaagttttaaggaaattagagtttttttttatagtatttttttttttgtgttagcgagtttttttttatttttttttggggtttttattatagtgatttttttagttgttattcgttatttttttgtgttttttggtgtgtgggtgtgtgggggtgtgggtgtgtgtttttggatttattttgttggttaggttggagtttagtggtgttaatatagtttattgtagtttcgatattttaggtttaggtgatttttttattttagttttttaagtagttaagattataggcgtttgttattacgtttagttattttttgtattttttatttgtttgtttttgagatagagttttgttttgttgtttaggttggagtgtagtggcgtaatttcggtttattgtaagtttcgttttttgtgtttaagcgatttttttgttttagtttttttttcgagtagttgggattttaggtatttattattacgtttggttaattttttgtatttttagtagagatagggttttattgtgttagttaggatggtttttattttttgattttttgattcgtttgttttagttttttaaagtgttgggattataggcgtgagttattacgtttggtttgttatttgttattttaatattttttttttttttattgttttttttaggaataagtttttgggaagagttgataatagttgtttttagttttattaggttttttaggtttttagtttttgtaggtgttttataattttgtttttgtaggt

SEQ ID NO: 67 - DNA, 1446 bp, Artificial Sequence
  chemically treated genomic DNA (Homo sapiens)
ggagtcgttgggtttaggatggataatggttttcgttggtgtatgagatttaggttatttttttattttttgtggtttatttgtttatattgattgattgattggttgattaagatggttttgttttgttgtttaggttggagtgtagtggtgtagttataggttattgtagttttaattttttgggtttaagtgatttttttattttagtttttggagtagttgggaatataggtgtgttattatattagattaatttttatttttttttgtggagacggggttttattgtgtcgtttaggttggtttggaatttttgggattaagtaatttttttgtttcggtttgttaaagtgttgggattataggtatgaattacgggtttttattattacgttttaggaaatgtttatattggagtgtgttttttgtttttagttgggttttcgattggttattgtggtttaatggagtgtggtgtcggtagttgttagcgtttgttttttgagaggggtggcgaggggtatataggattagattgtttttattgttggatgattgggtaagtcgttttttttttttgggtttttgttttttaatatttaatattttgttgtgggttaagtgaagtttaagtttttttcgattttaatatgaggttgtttcggaatatttattttgtgttttgaatttaataatcggttgtggagggtattataggtaaatttgtattgtgagtgggttgttgttatttaattatttgatagtagttgcgaataggtgggtagtgtgttttttataggtagcgacgatttttggaggtggatttagaggtataattaagtcgcgcggcgtattagggtttaagggtatggggttttcgtagttgtggttggggtagagttggggttgtttttttttttaggagtataggcggcggtttagttttacgtttttcgtttttagttatattcggttcgcgtagtggggggtttaatagatttttttttttcgggttttagttttttcgttagtaagggcggataaggatttttttcgtttcgttagaggaggcgatcgaggggtttgagtttaggtataggtcggcgggtttaggaggcgcgaggcggatcgaattcgcgggaggagtaaagatttttgatgcgcggtcggagggcggggcggaggacgggatttacgcgattggtattttgtttttcgttttagttaatgagcggcgagggtgttttgggggcggggtagaattagtttttaagttgtagtgacgtttcggcgttattgttgcgttttatagacgtcgcgtgtattcggttgtttttaggcgttgttaggtatcgtttgggcgtcgttgttttggggttttggttcgggtttggtcggggttttttgatagcggcgggggaggcgggcgggcgtagggtgtcg

SEQ ID NO: 68 - DNA, 1446 bp, Artificial Sequence
  chemically treated genomic DNA (Homo sapiens)
cggtattttgcgttcgttcgtttttttcgtcgttgttagggaatttcggttaggttcgaattagagttttaggatagcggcgtttagacggtatttgatagcgtttgaggataatcgggtatacgcggcgtttatgaagcgtaatagtgacgtcggagcgttattgtaatttaaaggttgattttgtttcgtttttaagatattttcgtcgtttattggttggggcggagggtaggatattaatcgcgtgggtttcgtttttcgtttcgtttttcggtcgcgtattaaggatttttgtttttttcgcggattcgattcgtttcgcgttttttgagttcgtcggtttgtatttgagtttaggtttttcggtcgttttttttggcgggacgagaagagtttttgttcgtttttgttgacgagaagattgaggttcgaaaaggaaaagtttgttgggttttttattgcgcgggtcgggtgtggttggaggcgagagacgtgaggttggatcgtcgtttgtgtttttggagggagggatagttttagttttgttttagttatagttgcgggagttttatgtttttgaattttgatgcgtcgcgcggtttagttgtgtttttgagtttatttttaaaagtcgtcgttgtttatggaaaatatattgtttatttgttcgtagttgttgttagataattgagtggtagtaatttatttatagtatagatttgtttgtggtgttttttatagtcggttattaaatttagaatataaaatagatatttcgggataattttatgttagaatcggaagggatttggattttatttagtttataataagatgttaaatattggaaaatagagatttagagaaggaaagcgatttatttagttatttaatagtaggggtagtttggttttgtgtgtttttcgttattttttttagagggtaggcgttggtagttgtcggtattatattttattagattataatgattagtcgggggtttagttggaaatagagggtatattttaatgtgaatattttttaaaacgtggtggtgggggttcgtggtttatgtttgtaattttagtattttggtagatcgaggtaggaggattgtttgattttaggagttttagattagtttgggcgatatagtgagatttcgtttttataaaaaaaaataaaaattaatttggtgtggtggtatatttatgtttttagttattttaaaggttgaggtgggaggattatttgagtttaggaggttgaggttgtagtgatttatgattgtattattgtattttagtttgggtaataaagtaagattattttaattaattaattaattaattaatgtaggtaagtaaattataagggatggagaaataatttgggttttatgtattagcgagggttattatttattttaggtttaacggtttt

SEQ ID NO: 69 - DNA, 8693 bp, Artificial Sequence
  chemically treated genomic DNA (Homo sapiens)
agtttggataagatagcgagatttcgttttaaaaaaaaaaaaaaaaaaaagtataggaatgaggtattggagttagtagttgtagttttttaagagttaagttttttgtattggaggatatttagtgtatatgtgttattgatggttatggtttgagtaggtagtttgagttttttaggttgttttgagggtttttgttgatgcgagtttttattgaaaagtttagttgaggatattgtgttgaggaggttgtgggagggaggaagtatcgagtcgggtatgggagttttttcgttgtttgtgagttttttttttttgttgaattagtttttatttgattttttttaatcgttaggtgatagagattaggaagaaagaggttttatatatgtttttcgaggatgtgtttgtggagaggtttaggtgaggagaggacgggggacgtggttagggatttttagggtagttgagtaagtaggtgggtggtttgaggttaggaggggttaatgttaggaggtttagatttttgtggatttaagggtagaaggtgggttttgttgtggtttaggagttttgggtaaagtttaattttattatattattgtagtttatgtttcgagtatgtaatgttgagttatgtttgtagatgagatatagttttcgggggttttggttaagtttatgttaaatgtattttggaggagttatttttgataagatattattgtaaatttaagtaatgttttcggattatagtgggtgttgtgggttagtgttattttaatattagaggaatttaagggaaagatgttttgtaaaattaaaatgtttaatagtaggggatggttttataaattatggtttatttatatagtagataattatgataatgttttagaagaatatttaatgtaaaatatttattatataaataggttaataaaatagattatagaatagcgggtggggaaggggatatttgtgtatatttaaaaatacgggattaagttgggtgcggtggtttacgtttgtaggtttagcgatttagaagattgagtaggaggattttttgagtttatgagttcgagataattatgggtcgtaaagtaagaatttatttttataaaaaatgtttaaaaattttgttcgggttggtatagtgatttacgtttgtaattttagtattttgggaggttaaggtgggcggattatttgaggttagaagttcgagattattttggttaatatggtgaaattttatttttattaaaaatataaaaattagttaggtatggtggcgtatatttgtagttttagttattttattcgggaggttgaggtaggagaatttgtttgaatttaggaggtaaaggttgtagtgagtcgagattatgttattgtattttagtttgggtaatagagtaagattttgtttaaaaaaaaaaaaaaaaaattaggtcggttatagtggtttatgtttatgtaattttagtattagtattttgggtggttgaggcgggtagattatttgagattaggagttggagattagtttggttaatatagtaaaattttgtttttattaaaaatataaaaattagttaggtgtggtggcgtgcgtatgtaattttagttatttgggaggttgaggtaggagaatcgtttgaatttgggaggtagaggttgtagtgagttgagattatgttattgtattttagtttgggtaatagggagagatttggtttaagaaataattataataataaataaataaataaataaaattagttaggtatggtggagcgtatttgttgggaggtagagtaggaagattattttagtttggtaggttaaggttgtagtgtgttatgatggtgtttgtgaatagttattgtattttagtttgggaaatatagtgaggattttgtttttaaaaaataaaaagggggagggaagatggatttttaatttgttttatgagaatagtataattttttgatatttaaattagataagaattttataagaaaggaaaattataggtttattttatgaatattaatgtaaatgttttaaataaaatattagtaaattgagtttagtgttttttgtataaggataatatattataattaaattgggtttaatttaagaagttatggtaggtttaatattaaaaaattaataatgtaataatttattatattattagaataaaggtgaaaaattatgttatgttagataattaaaggtatttgttttaggtttttaaagaggagttagtggtataaggatgtaagggtagtggtgatttttttttagtggtattagttgaagtgagaatggtagcgttttattttggggatagaagtgacgtttatgttagacgtttgtggttttgatatgttttttgtggttttttgtggtttgttttttttttttttattggatgtgattttggttatggttttagttatattgtgtttttgtttatttttagattttggttttttaatttgtttagtgatttttttttttttttagatggagttttgttgtgtcgttaggttggagtgtagtggcgcgatttcggtttatcgtaattttcgttttttaggtttaagcgatttttttgttttagttattcgagtagttgggattataggtgtgcgttattacgttcggttaatttttgtatttttagtagagacggggtttcgttattttggttaggaatgtttttattttttgatttcgtgatttgtttaatttagttttttagagtgttgggattataggcgtgagttattgtgtttcgtttatttagtgattttaaatgtagtttaatggttttttagtttatggaggttaaagtaggttttgttgtattaaattaagaaattgggttgggtgtggtggttaatatttgtaattttagtattttaggatattgatgtggattatttgagtttaggagtttgagattagtttaggtaatatagtgaaattttgtttttattaaaaataaaaataaaaataaaataaaaaattaaaatttaaaattagttgggtatggtggtatgtatttgtggttttaggtatttaggaggttgaagtatgaggattatttgagtttaggaggtggaggttgtagtgagtagtgtttatattgttgtattttagtttgggtaatagagtgagattttaatttaaaaataaataaatagaatgagagagagagagaagaaaagaaagaaggaatttagttaaagaagttgggtttatttggattttttttggtttgttttatttgttgttattagtagttttttgaagttataaaaataatataaagtaaaataaggtaaaattattatttgtttgaaagagtttataaatttgatggtggtcgtggggtggatggaagattaaaaaaatggggatagaagtgaattagtgtaagttatttgtattgataagatggggatggatttttgtggaaggtagaggaggttatgttttatgtttttggtaggaaaagtggttaaagagggttttagagaataggggttgatggatgggttatattttgatgtgagttaagtttttggatggttggagagaggaaggatgttttagttgggggaatagtttggataatggagatttaagaaagttatgttttagtagtgtgaatgttgtggatgttgaagtgttaggatgtaaggtggagaattgggaaatggttttggaaaggggcgaaagtcgggtgatgaagtattttgtttattgtgacggagtttggattttttttgtggtttaaagggaaaggattgttgaatgtaaagttaatgttattagaaaagttgaatttataagagagttttggagtttaaaagagtattttatggggaattaggaaagttttggtatttggtagattaagtaagtgttttgatttgaagtttagtttagttttaatatttttttttatatttattatatcgtataatttggttttgtttatttattttaggttaaggtagagttttttagtttggtttgagtgttgtatttttttttttggtttgatatttggaattaaagttaagttagaattttagggttaagggggatgttgaaaattgtttgagtttttagattattttgttagtttatggtaaagggagggattagaggttatagggaaagtattttagttgttttttatagtattattttttttttatttaatggtttaggttaataggattttttttttgaggtttgggatacggaagggagttttttttaaattaggtttttggagagtaggttttaggggagtagtgtaatttatttttatatttataagacggtttttgatttttgttttttttttttttttttaaagtggaatagagagaatatgattttttacgatttttatattatagtttttaaataatggggaaatcggaggttttttcgtgtgtagacggtgatatttatcgttaaatgcgaattaggtagatgttagttttagtacgtacgtaggtaattttattttcgttttaacgattttagaggttgttcggtttgttttatacgggggtgttaagtttttcgttcgttttaagcggagatttaacgttatttataattaagttttttttgagggcgagcggttaggtgcgttttcggtaggatagtgttaattttagtttttttttagcgcgttttttcgcgttcgtttttcgtttggaagttttttttttacgtttcgcggtttttttttttttggttcggggagttgttttttgtgttgtcgggaaggttaaagtttcgcgtttattaggagagttcggtaagtatataaggatagaggagcgcgggattaagcggcggcgaaggaggggaagaagagtcgcgatcgagagaggtcgtcgagcgttttcgtttttagagagtagtttttcgagataggtaagggcgtagcgtgggggattcgtgtttttttttcgggattttttgttttcgttttcgcgatgtagtcggtcggtttcggtttcgaaggcggatttgggcgtttttggtttttcgcggtttcgagttttcgataaattttttgcgtcgattgcggtatgagaagtcgttagtagttgagttggagggtttacgttcggtttttgggcggacggtcgcgaagttgtaggcgttgtttttagggagtcggcggtttttttttttttaggggttcgcggcggttcggaggtttcgagagtttgttaggaggttttgggataattcggtttttttttttttttttgagacggagtttcgtttttgttgtttatgttggagagtaaaggggtgatttttgtttatcgtaattttcgtttttcgggtttaagcgatttttttgttttagtttttcgagtagttgggattataggtatgcgttattacgttcggttaatttttgtatttttagtagagacggagtttttttatgttggttaggttggttttaaattttcgataataggtgattcgttcgttttggttttttaaagttttggtattataggcgcgagttatcgttttcggttagttcggttttttagtattttttgtttttagtttttaggataggtgttatattttgaaagttaaattttatatacgttatcgtaaattaatgttggaaacggggtagtagagaaaaggataaaagttataatgaacgttttgtttttcggattttttcggatttagatttttgaatttttgtttttttgtttattttagcgtattcgaggtggtcgcgttatgataattatatgataattgggttaattataatgtagaatagttgggttttttttttttaagatttagttggggttaaaaataggtggtcggggcgggatttgttttagattttgaaacgtattgtttagtttcggatgttttaatagaatcggggtggacggtttatggcgtagattttgggttgagggtacgggtagttatttaggaatgattaaggtttaggtaagggggcgtttttagcgaaggagagatagtttatttggtatttggattttttaaattttttatgtttaaatggggtagggagggtttttatagaatggttggaaggagttaaggaaaataaaagtgtgtgtggattttttttgtgtgtgtgttagtttataaattttgtatagattatggttattttaatgatttattgtttttttgatgtttttgttataggattcgatgtatgtatgttatggtgtaaggataaaattcggtttttgtgtttttttaatttttataaaaggttatggttagcgtgtagttttatagtaataagtaaaatgatttgttgagtttatagagagttttttatatttatgaagttttaataagtgtagttttattataaagttaattttaggatgagtaaattttaagtttttatttttttagagttttttatttttggattataatattttttttatttaaaaaagtataatatttgatatttttttaataatttgttgttttaaaaatgatataaaaggtattatttgtttattgtagagaattgaaaatatatataagtaaatatatatatatataagtaaaatatataatataaatataagattattttttagggaagaatttgaagttttagtaatagtagttatttaattagtttagtaatagaatataagttttgagagggtgggagtgaatatgttattatattgtataatatagtatatagggtataaggaggggaaatgttttttggggttttttaggaaggtttgaagttattgtttttagtaaatggaaattattttagagtagttatttttgataagaattgaaatataattgagggaattattagatttgtaagattttgtttttttttttattaatatgttattttatatttgtatttggtgatatacgtaattattatttttttgtgattgtaatatttgggtattttttagagttaaatgtgttatggttaatttggagttttaatttaattgtttggtttattaagttttggttgtgtatttgaatagattattggtagggtataatgggaatagtttgttttttggagttaggagaggatattaaggttgattaaagttcgtttagttgtttttttagtcgaagcgtatttgggttagttattggttgttagtgttatttaatggttgttttgaaaatgtttagttttgttcggtaattttttagaagttagtatcgtgtaggtttagcgtttggggaatagggcgagggtggggtagagagaaggaagtggttttttgaagtagaaattagcgttttagaggatttttatttttaaagttttttttatataaaaaagatttggtttacgtttttttaaatgagagatttattttaggtaaatttattttaaaatgttagcgtttattaggagtgataagatatttagttatttacgttttaatgtgaattattttttttatttaattatatttttttttagtagttggttgagaagattttttgaaatttaaaatgattgtagggttggcggtgagttgattttcggtttcgaggtggttttagggggtttatttggttaagggaaatttggtagtgcgagggtagtgttggagagaggggtgggtatagggggttaggggtattatggatgttttttttttattgttttttggtgttttgattttagtttttgtttataggtatttgttggattttttaaaagtatttgtagtggttgttttattaggaggtaatttttttttggttttttttttttttatatttgtattttttttaaattttgttattttagattatatttgagagttttagagaataagatatttgatacgtgacgtgtttagaagatgagttagattttaaagaattgagatttgttttaaaaacgaagttttttaaagttattggagtttgggtaatagtgattattagagtaatttgtgtgtaggatattaaattaggttgttcgaaatgttgtttaaattggttagtggttttatttgtttttttgttaatttaatatttataggaaatagagttttagaggaatgataggattttggtggaataaaaagggaaaagattattttgagtaggagttttagggtttttcgttttttttaagttatttttatttttgagattttgtatgttagaattatagtttaatgtagtgaaataggaaagttttttgttaggagtttagttttattttgttatggatattaaagtaattgtttttttttgggttttaatttttttattttttatgggaagggttgaattaagtaatttttaaaatagtttttagttttaatttttttaggggtttcgtttaaatagaagataatagggaaatggttatagtttatttattatttttttttttttattataatttatattatcgttgtattgtatatttttttttttagtattgttgttgtttttaaaatgtttttaattttataagagagtgtgttgttaatgttggtttaaggttttttttggtgagtggttaatattgttttgttttttgtaggggttttattaattttgtttgtttttgtaga

SEQ ID NO: 70 - DNA, 8693 bp, Artificial Sequence
  chemically treated genomic DNA (Homo sapiens)
tttgtagaagtaaataagattggtgggatttttgtaaggagtaaaataatgttggttatttattaggaaggattttgagttaatattaataatatatttttttgtggagttaaaggtattttaaggatagtagtaatgttgagaaaggaggtgtgtagtatagcggtggtataagttgtgataaggaggagggaatggtgggtaaattgtgattatttttttgttattttttatttaaacgagatttttaaaaaggttaaggttggaagttattttggggattgtttggtttagttttttttatgagagatgggaaaattgaagtttaaagagagataattattttaatgtttatgataaggtaaggttaagtttttaatagagaatttttttattttattatattaagttgtagttttaatatgtaagattttaggagtgaaagtaatttgggaaaaacggaggattttgaaatttttgtttaagatggttttttttttttttattttattaggattttattatttttttgaaattttattttttatgaatattaggttgatagaaaagtaaataaaattattggttaatttaggtagtatttcgagtagtttgatttgatgttttgtatataaattattttggtgattattattatttagattttagtaattttggagagtttcgtttttaaagtagattttagttttttgaaatttggtttattttttggatacgttacgtgttagatgttttgttttttagagtttttaaatgtggtttgaaatggtaggatttgaagaggatgtagatgtggaggggaaagagattagaagggaattattttttggtggaatagttattgtagatatttttggagaatttagtaagtgtttgtgggtagaagttgaggttaagatattaggggatagtaaggagggggtatttatggtgtttttagttttttgtatttatttttttttttagtattattttcgtattgttaaattttttttaattaggtgggttttttgaagttatttcgaggtcggagattagtttatcgttaattttataattattttggattttagaagatttttttagttagttgttagaaagaaatgtaattagatgagaaaagtaatttatattaaagcgtggatgattaagtgttttgttatttttaatgaacgttggtattttaaaataagtttgtttaaaataaattttttatttggggaggcgtgggttaaattttttttatataggggaggttttggaagtgaaagttttttgaagcgttgatttttattttaggaggttatttttttttttttattttattttcgttttattttttaggcgttgggtttgtacggtgttagtttttgaagggttgtcgggtaaggttgagtatttttagagtagttattagatggtattggtagttagtgattggtttaggtgcgtttcggttaaaggggtaattgaacgagttttggttaattttggtgtttttttttggttttaagggataggttgtttttattgtattttgttagtgatttatttaagtatatagttagaatttggtggattaggtaattagattaaagttttaagttgattatagtatatttagttttgaaaaatgtttagatgttatagttatagaaaaatggtagttacgtatgttattaaatgtaaatgtaaagtaatatattagtaaaggaaaaaataaaattttataggtttgatagtttttttaattatattttaatttttgttaaagataattattttggagtgatttttatttgttagaagtaatgattttaggtttttttggaaagttttagagagtattttttttttttatgttttatgtgttgtgttgtataatgtggtaatatatttatttttatttttttagagtttatattttgttgttaaattggttagatggttgttattgttaaaattttagatttttttttgaaagatggttttgtgtttgtattgtatattttgtttatgtgtatgtgtatttgtttatgtgtatttttagttttttataatgaataaatagtattttttgtgttatttttaaagtaataaattattggggaaatattaaatgttgtgtttttttaagtagggaaagtattataatttaaaaatggaaagttttggaaaaatagaaatttgaaatttgtttattttgagattaattttatagtagaattatatttattagaattttataggtgtgaggggttttttatgagtttaataaattattttgtttgttattgtaaaattgtacgttggttatgattttttgtaaagattagaggagtataggggtcgagttttgtttttatattatgatatatatgtatcgagttttataataaaagtattaaaggaatagtaagttattaaagtggttataatttgtgtagagtttataaattgatatatatataaaaaaaatttatatatatttttattttttttggttttttttagttattttgtaagaattttttttgttttatttaaatatgaagaatttggggaatttaaatgttaagtggattgtttttttttcgttgaaaacgtttttttatttgagttttgattatttttaaatggttgttcgtgtttttaatttaggatttgcgttataaatcgtttatttcggttttgttgaggtattcgaaattagatagtgcgttttaggatttaggataagtttcgtttcggttatttgtttttaattttagttaggttttggagagaagagatttaattattttgtattgtaattgatttagttattatgtaattattatagcgcggttatttcgggtgcgttaaggtgggtaaggaaataaggatttaggggtttgaattcgaaaaaattcggaaggtagggcgtttattatgatttttatttttttttttgttgtttcgtttttaatattaatttgcgatagcgtgtatggaatttgatttttaagatgtgatatttattttggaaattgggagtaagagatattaaaagatcgggttggtcgggggcggtggttcgcgtttgtaatgttagaattttggggggttaaggcgggcggattatttgttgtcgggagtttgagattagtttgattaatatggagaaatttcgtttttattaaaaatataaaaattagtcgggcgtggtggcgtatgtttgtaattttagttattcgggaggttgaagtaggagaatcgtttgaattcgggaggcgaaggttgcggtgagtagagattatttttttgttttttagtatgggtaataagagcgaaatttcgttttaaaaaaaaaaaaaaagatcgggttgttttaagattttttagtaagttttcggagttttcggatcgtcgcgagtttttgggggagaggaggtcgtcggttttttggagatagcgtttgtagtttcgcggtcgttcgtttaggggtcggacgtgggttttttagtttagttattggcggttttttatgtcgtagtcggcgtagaaagtttgtcgagaattcgggatcgcggagagttagaggcgtttaggttcgttttcggagtcggagtcggtcgattgtatcgcgaggacggggataggggatttcggggaaagagtacgggttttttacgttgcgtttttatttgtttcgggaggttgttttttgagggcggggacgttcggcggtttttttcggtcgcggtttttttttttttttttcgtcgtcgtttggtttcgcgtttttttgtttttatatatttgtcgagtttttttggtgggcgcgggattttgattttttcggtagtataaggagtagtttttcgggttaggggaaggggggtcgcggggcgtgggaggggggtttttagacgggggacgagcgcggggagacgcgttggaaaggggttggaattagtattgttttgtcgaaggcgtatttggtcgttcgtttttaggaagaatttaattatggatggcgttgggttttcgtttagaacgggcgggaggtttagtattttcgtgtggggtaggtcgggtagtttttgaggtcgttgaggcgagggtgaagttatttgcgtgcgtgttggggttggtatttgtttggttcgtatttggcggtaaatattatcgtttgtatacggggaggttttcgatttttttattgtttggaaattgtgatgtggaagtcgtggggaattatattttttttgttttattttggggaggggaggagggagtagaagttaggagtcgttttgtgggtgtgaaggtgagttgtattgtttttttggggtttgttttttaagggtttggtttaggggaggttttttttcgtgttttaagttttaaggaaaaagttttgttaatttaaattattaaatggggagagggtgatgttgtgaagagtagttgaagtgttttttttgtggtttttgatttttttttttgttatgagttggtagggtggtttggggatttagataatttttaatattttttttggttttggagttttggtttggttttagttttaaatattagattagagagaagagtatagtatttaaattaagttaagagattttattttaatttggagtaaataaataaaattaaattgtgcgatgtggtgggtgtgggagggagtattgggattaaattggattttaaattaagatatttgtttaatttgttaaatgttagaatttttttgattttttatgagatgtttttttggattttaggatttttttgtggatttagtttttttggtgatattggttttatatttagtaattttttttttttggattataagagagatttaagtttcgttatagtagataaggtgttttattattcggttttcgtttttttttagggttattttttagttttttattttgtattttggtattttagtatttataatatttatattgttagaatatggtttttttgggtttttattgtttaagttgtttttttaattagaatattttttttttttttagttatttaggagtttgatttatattaagatgtagtttatttattagtttttgttttttgaagttttttttggttattttttttattaggggtatgaggtatgattttttttgttttttatagaagtttatttttattttgttagtgtaagtggtttgtattaatttatttttgtttttatttttttaattttttatttattttacgattattattaggtttgtaaatttttttaagtagatggtggttttgttttattttattttgtgttatttttgtaattttaggaggttgttggtggtagtagataaaataaattaggaaaaatttaaatggatttaatttttttaattgggtttttttttttttttttttttttttttttttattttgtttgtttgtttttgaattagggttttattttgttgtttaggttggaatgtagtagtgtgaatattgtttattgtagtttttattttttgggtttaagtgatttttatgttttagttttttgagtatttggaattatagatgtatgttattatgtttagttaattttgggttttggttttttgttttgtttttgtttttgtttttggtagagatagggttttattatgttgtttaggttggttttaagtttttgggtttaagtaatttatattagtattttgaagtgttgggattataggtgttagttattatatttagtttagttttttaatttaatgtagtagaatttgttttggtttttatgaattgaaaggttattgaattgtatttagaattattgggtaggcggggtatagtggtttacgtttgtaattttagtattttgggaggttgagttgggtagattacgaggttaagagatggagatatttttggttaagatggcgaaatttcgtttttattaaaaatataaaaattagtcgggcgtggtggcgtatatttgtagttttagttattcgggtggttgaggtaggagaatcgtttgaatttgggaggcggaggttgcggtgagtcgagatcgcgttattgtattttagtttggcgatatagtaagattttatttaaaaaaaaaaaaaaattattgggtaggttgggggattaggatttaaaaatgggtagggatatagtgtggttggaattatggttaaaattatatttagtggagaaaaaaaaaatagattataaggggttataaggggtatgttaagattataggcgtttgatatagacgttatttttgtttttaggatgggacgttgttatttttattttagttaatgttattagaaaggagttattattgtttttgtatttttgtattattagtttttttttgaaagtttagaataggtgtttttgattgtttgatatgatataattttttatttttattttagtaatgtggtgaattattgtattgttgattttttggtgttaaatttattatggttttttagattaaatttaatttgattatgatgtattatttttatatagaaagtattggatttaatttgttaatattttatttaagatatttgtattgatgtttatgagatgggtttgtaattttttttttttgtggaatttttgtttaatttgagtattaaaaaattatgttgtttttataaaataagttggaaatttattttttttttttttttttattttttaaagatagggtttttattgtgttttttaggttggagtgtagtggttatttataggtattattatagtatattatagttttgatttgttaggttaaagtgatttttttgttttgttttttaataggtacgttttattatatttggttaattttatttatttatttatttattattataattattttttagattaagtttttttttgttgtttaggttggagtgtagtgatatgattttagtttattgtaatttttgttttttaggtttaagcgatttttttgttttagttttttaagtagttgggattatatgcgtacgttattatatttggttaatttttgtatttttagtagagatagggttttattgtgttggttaggttagtttttaatttttgattttaagtgatttgttcgttttaattatttaaagtgttagtgttgggattatataggtataagttattgtgatcggtttaattttttttttttttttttagatagagttttgttttgttgtttaggttggagtgtagtggtatgatttcggtttattgtaatttttgttttttggatttaagtagatttttttgttttagtttttcgagtagagtagttgggattataggtgtgcgttattatatttggttaatttttgtatttttagtagagatggggttttattatgttggttaggatggtttcgaatttttgattttaagtgattcgtttattttagttttttaaagtgttgggattataggcgtgagttattgtgttagttcgggtaaaatttttaaatattttttgtagagatgggtttttgttttgcggtttatggttgtttcgaatttatgggtttaagagatttttttgtttagttttttgagtcgttgggtttgtaggcgtgagttatcgtatttagtttagtttcgtatttttaaatatatatagatatttttttttttattcgttgttttgtgatttattttattgatttatttatgtaatgggtattttatattaaatatttttttaaaatattgttatgattgtttattgtatggatgggttataatttataaagttattttttattgttagatattttggttttgtaaaatattttttttttgagtttttttgatgttgaaatgatattggtttatagtatttattatgattcgaaaatattatttggatttatagtaatgttttgttaggaatgatttttttaggatgtatttagtatgggtttggttaaagttttcggaggttgtgttttatttgtaaatatggtttagtattgtatgttcgaggtatggattgtagtaatgtgatggggttgaattttatttaggatttttggattatagtagagtttattttttgtttttgagtttatagaagtttgagttttttggtattgattttttttgattttagattatttatttgtttatttagttgttttggggatttttgattacgtttttcgttttttttttatttgggtttttttataaatatattttcggggagtatgtatggagtttttttttttttggtttttattatttggcggttgggaggaattagataagagttggtttagtagggagagggagtttataggtaacgaaagagtttttatgttcggttcggtgtttttttttttttatagtttttttagtatagtgtttttagttgagttttttagtggaaattcgtattaatagggatttttagggtagtttgagaagtttaagttgtttgtttaggttatggttattaatgatatatgtgtattaagtgttttttaatgtagggaatttaatttttaagagattgtagttgttggttttaatgttttatttttatgtttttttttttttttttttttgagacggagtttcgttgttttgtttaggtt

SEQ ID NO: 71 - DNA, 8085 bp, Artificial Sequence
  chemically treated genomic DNA (Homo sapiens)
  unsure (2545): unknown base
gttttatgatttaattattttttaatatttttttttattaagattattatattggtgattgggttttgatatatagatttggggagaatataaatatttatattatagtatttattaatttatttagttattttattgttaggtatttatttagaaaaaatgaaaatatatgtttatataaagatttgtataatatttttatagtagttttatttataatattaaaaaaattggaaataatttagatatttatttatagttaaatggataaataaattatagtatataaataaaaagaataaaaagaattaattattgatatatattataatttagttgaattttaaaataattatgttgagtgagagaaattaaatgaaaaaaagatatattatattatatataattttaagaaataaaatttaatttatttggtatttagatttttatttttatattagttttaaataaaaagttttaaatttttttggataaatggttgattttacgattggggtaggaaatatataagatgagtttgatgagtttgtagtattttgtaatattagaaagtaggaaagtttatatatatatatatatatatataatatagagagtgggttaaggagtataagagttaattgaaaaagtttttagtgttaaaaattggaaaaatttgagtaataaagtatttatgaatttatataaagaaaagattgaataaagaagtaaatgggggagaagaagtaaattttttttatagaattttaaataaattatgtagatattttattttaaaggagggttagtataattttttatttttttatatttttttaagtgatttataatgatttttttttaaagagtatagagtatgtaaagagggaaaaaagagtaattatgtaatggagaaatttgataaatattattttagttaggtgatggagaataatattaatagttataagttatgttgataatatgtattttttatatgatgtaataaatatagtatattatttttttgatttttatttcgttaaaatttaaaattttagtttatttatgaggatatattaaattttaatagaagggtattttgtaatatattttattagtatttttaaggattgttaaggttattaaatataaggaaaatttgagaaatttttatagttaagaggagtataagatattataataattaaatgtggtgttttggatggaattttggaaaggaaaaaggatattaagtgaaaatgaagaaaatttaaataaattatgaatattagttaataataatttattagtattagtttattaattgtaataaatgtattttattaatttaaaatgttaatagagaaaattgtataaatgatatatgagtattttttatattatttgtttaatttttttgtaaatttaaaatcgttttttaaaagtaaaatttattaataaaatatttaaagtaaatagatttaaaaggtatatgtaaatgtataatttaatgtttaataaattagatataaatatttttaaaaatttaatatttggtgatagaaagtagattagtggtttgttagaaagtggtgattagtattaggggaaggggatgggatagaatagtatgaagggatttaaaaaatggtatgaggaaatttttggaggtaaagggtatgtttattattttagttttataggtttaataataaattatataatttaaatatatgtagtttattatatgataattatattttgataaagtggtttttttttttaaattatagaaaaaatatttttatatttaaatttttttttttaaaaatagtttttaggaatatttgaagttagttttattatatttgaatttaattagtgaattttgtttatttaaagatttatatatttgggaagtttttgtgttaaaaatgttaattatttagtattaaaatttatggaataatggtgatttaggatatgttggatatttttattgttgtttttttattttaagatttttaattttttggaaataatttttttagatattttgataagggaattattataattaattaaaattaagttaaatatagtttgttagatttaaaatgaggttaagtgttaattttatagtagcgatcggaaaattaaattatatggtatttgatatttaaaattatatttttaagaaggttgttatttgatgttttgggtttgggttatagtatttaattttataatattgggtaattttgtgttttagtttttttaattatgaaattgggataatagtatttattttgtgagattgttgaaggattatagttaatataggtaaaaggtttataagattatttggtaatgttgttttgattttataaattttatatattgtgtggtattagttattaggaaaatataaataaattagtgagatattattttatatatttggggggttataataaaaaagatagataaaaaatgttgttaaagatgtgaagaaattaggatttttatttattgttggtgnaaatgtaagaagtataattatttgaattatagtttggtagttattttaaagattatatttagagttgttatatgaattagtaattttatttttatgtatatatttaggagaaaggaaaatatacgttgtataaaaatttgtatatgaatgtttattagtaggattttttatggtagttaaaaggtgtaaataatttaaatgtttaataattgatagagatggataaataaaatgtggtttatttatataatgaaatattatttgttaataaaaaggagtgaaggagtgaagtattgatttatgtggaatatggatgaattttgatttaaaatagttaaattataggtataaaaagtatattagtggttgttgggagatttaggcggaaatgtggaataattgttagtgggtattgagattttagagttatatttatgttataaaattaatagtgttgatggttgtataattttgagtatatgaaaaattaatgaattgatattttgagtgagttgtatgatattggaattatattttaataaagtatggtaattgttttaagataggttggaaagagaaagtttgaaaataataataatgatattaataaattagtttatttttttagttttatatatttttgtgtttatatttgtttttgttttatttataatggtttttttgtagttgttatattatattttgttatttgatgttcggtgaatattttatatttgttttttagaattttttttattttttttttatttgtttaatttttatatatttaaaattaattagagtaaattatttattagaataattaattttaaattttagtaatttaatatgataaaggtttgttttttatttatatagtttttttttagatgatcgaggggtttaggttttttatttttagtggtttttttattttttggagttttttgtattttttatatatggttgagataaattatgagttattagtatagttagattttgaggttttataagaaaatttgtaaattatttattttgttttgaataaggtatatttaagatgatgttaaaatatttaatggttttgggttaaatatagtttatgattgtgtatttaaaatatatattgtaatatttttttttttttttattgattttatgaatttagcggggatttattttataagtttaaagataattattttttagattaagaatatttagggtaaaaagtattgtttaatatttttattgaggatgttatgatgtagtatattgtataagttggagttaaaggaaattttttttaaagtgttatttattaaaaattggaatatattttttaagataaatcgaagtgtggtatataatatttaaatttttattatagatatagaggtgttattattttttatttttaaatttttttgttacgttgaggatatttaagaggagtaggatatgttggtcgtagtaggagaaatttgaaagtatttatttttatggaatttataagggagagaattttttattttagtatcgtttttgatatatttattattttaaaagataatgtagttaaatgtttttttttgtgttaaatttttataaaattgaaattttaaaatggtgataaaaattttatttttgatagaatttatttatttttttaattagatagggtataatttttaatttgtaaaataaaacgtaatatgtttatgaggttttattttaaagaatttgttattgagagtagtatttagaataacgggtggaaatgttaattttagagttttagattttatcggtaattggggtagggaggggttttgggcggggtttttttagaggaggaggcgttgttagaaagttgtttggttagtttatagttgttattaatcggggtaagttttgttgtatttgtgcgtgtgggtggtatttttaatgagaattagttttatttgttatttgagtgaaatttataattcgaggcggttagtgttttcgtattattgggatttgagattttcggagatgattgtcgttcgtagtacggagttagtagaagttcgattttttttgggaatgggttgtatcgagaggttcgattagttttagggttttagtgagggggtagtggaatttagcgagggattgagagttttatagtatgtacgagtttgatgttagagaaaaagtcgggagataaaggagtcgcgtgttattaaattgtcgtcgtagtcgtagttatttaagtgtcggatttgtgagtattttgcgtttttagttttcggatagaagttggagaatttttttggagaatttttcgagttaggagacgagattttttaataattattatttttttttgcgttttttatttgtcgttcgttgggataaacgatagttatagtttttttgacgataggatggaggttaagggtaggagttgattagcgtcgttttttttcgttttcgatttaggaggtggagattttttcggtttagttatatttaatatttatttttttttttttttgtttttatattttcgaaatttttttttttttttttttttttttttttttggagacgggggaggagaaaaggggagtttagtcgttatgattgagttgaaggtaaagggttttcgggttttttacgtggcgggcggttcgttttttttcgaggtcggatttttattgttgtgtcgtttagtcgtaggttcgttttcggggagttagatttcggatattttgtttgaagtttcggttatatttatttttttggacgggttatttttttttcggttttgttagggataggattttttcgacgaaaagacgtaggattagtagtcgttgtcggacgtggagggcgtatattttagagttgaagttataaggggtgttggaggtagtagttttagttttttagaaaaggatagcggattgttggatagtgttttggatattttgttggcgtttttaggtttcgggtagagttaatttagttttttcgtttgcgaggttattagtttttggtgtttgtttggtttcgaatttttcgaagatttatcggttgttttcgttatttagcgggtgttgttttcgtttatgagtcggttcgggtgtaaggttggagatagtttcgggacggtagttgtttataaagtgttgtttcggggtttgttattagttcggtagttgttgttttcggtttttgagagtttttattggttcggggttttagtgaagtcgttttcgtaggtcgttgcggtggaggttgaggaggaggatggttttgagttcgaggagtttgcgggttcgtttttgaagggtaaatttcgggttttgggtggcgcggcggttggaggaggagtcgcggttgtttcgtcggggcggtagtaggaggcgtcgttttggtttttaaggaagattttcgttttttagcgtttagggtcgttttggtggagtaggacgcgtcgatcgttcgggacgttttcgttggttattacggtgatggattttatttacgtgtttattttgttttttaattacgttttattggtagttcgtattcggtagttgttggaagacgaaagttacgacggcggggtcggggttgttagcgtttttgtttcgtcgcggagtttattttgtgtttcgtttatttcggtcgttgtaggcgattttttcgattgcgcgtattcgttcgacgtcgagtttaaggacgacgcgtattttttttatagcgatttttagtcgttcgttttaaagataaaggaggaggaggaaggcgcggaggttttcgcgcgtttttcgcgtttttattttgtggtcggtgttaatttcgtagttttttcggatttttcgttggggttatcgttttcgttgtcgtcgcgagcgattttatttagattcggggaagcggcggtgacggtcgtattcgttagtgttttagtttcgtttgcgtttttttcggggtcgattttggagtgtattttgtataaagcggagggcgcgtcgttttagtagggttcgttcgcgtcgtcgttttgtaaggcgtcgggcgcgagcggttgtttgttttcgcgggacggtttgttttttattttcgtttttgtcgtcgtcgtcggggcggttttcgcgttttattttgtattcggttttaacgggttttcgtagttcggttattaggtcgtcgtgtttaaggagggtttgtcgtaggtttattcgttttattttaattatttgaggtgagggttcgggacggggtacgtttagcgcgttcgggagtagcggtttcgttggcggcggcggtcgttaatttttagttttagttttagcgtatcgttgcgtttttcggggcggtcggagagggtgggtagcgggatatagtataggggtagttgtttttttttttttttttttttttttttatttttggggatacgaaggtgggcgtagaatatattatttttggggcgtgtttttttgaaagttgtttttttgtttgttttttaatttttcgaattttttagatttcgaagtagaattaatttcgatttaaaacgtgtagcgttatattaggttcgttgtagtttagtggggtagaaagtgcgcggcgagttgggggttttatgaaatgttttttttttagaagaaggacgtttattaggagtgtttgttttggagaggagttaaggtatcgttttttcgggaggggtgggatttgagaggtggtcggttagaatcgaaagtagtattattttagggatttgaatattttagtggtttagtttttttaagaattttaagattaaaattaagtttacgtgggaaatgtttaaattgtggatttaaacgtttgttattgtattgtatcgtttttttattattgtttgttatttattataattttttttatatataggtttaaaaaatattattttgtatattgaagtaatggaatgtaaaaaaagaatgttttgtttggaattttatgttgtgaataggtaaaatagtgttagtgtattggataatattttaaaatgataaatatatatttgtttaagtaagtaatgattatagggttgtgttttaaaaatttaaaattaaaatattgtaaagtattatcgaatttttaaagttaaattatatttgttttgatttagtatatagataggaaggatataatattttatttgttaaagattaaattgtttttatataaagagttttgtagaaagatttttttttaatcgattttaattttttaggatataatattatatattaattattgtttttttatattggtgttattgatgaatggttaattatttgtaagtatggtgaatttagttacggatagtttattattaagtttagtttgtatgttttttaagtgtatatatatagttttgtttttaaaatttttttttattttgttaatattggtttaagaaatttttagtattagatagtggtgtatttaaaaataaatggagtattttgttttgtattttaagg

SEQ ID NO: 72 - DNA, 8085 bp, Artificial Sequence
  chemically treated genomic DNA (Homo sapiens)
  unsure (5541): unknown base
ttttgaaatgtaaaataaagtattttatttatttttaagtgtattattatttaatattaaaggttttttaaattagtattaatagggtgaaaggagattttaaaaatagaattgtatatatatatttgaaagatatgtaaattaaatttggtaatagattattcgtaattggatttattatatttgtaaatgattagttatttattagtagtattaatataaaagaataataattagtgtataatattatgttttagaaagttaaagtcggttaaaaggaaatttttttataaaattttttatatagaaataatttagtttttgataaatgaaatgttatgttttttttgtttgtatgttgggttaaaataaatatggtttggttttaaaagttcgatggtattttgtaatgttttggttttgagtttttaaaatataattttgtaattattgtttatttaagtaagtatatgtttgttattttaaagtattgtttaatatattgatattgttttgtttatttataatataagattttaaatagagtattttttttttatattttattattttagtatgtaaagtagtgttttttaaatttgtatataaaaaaaattgtagtgaatagtaagtaataataagaaaacggtgtaatgtagtgataggcgtttaaatttatagtttaaatattttttacgtgaatttaattttaattttgagatttttaagaaaattgagttattgaagtgtttaaatttttaagatggtgttgttttcggttttggtcggttattttttaagttttatttttttcgggggaacggtgttttaatttttttttaagataagtatttttggtaaacgttttttttttaagaaagaagtattttataaagtttttaattcgtcgcgtattttttgttttattgggttatagcggatttagtgtgacgttgtacgttttaaatcggggttggttttgtttcggaatttggaagattcggaaagttaaaaaataaataaaaaaatagtttttagggaggtacgttttaaaaatagtatattttgcgtttattttcgtgtttttaagagtgaggagaggagggaagaagaagggaggtaattgtttttgtgttgtgtttcgttgtttatttttttcggtcgtttcggggagcgtagcggtgcgttggggttggggttgagggttggcggtcgtcgtcgttaacggaatcgttattttcggacgcgttgggcgtgtttcgtttcgggtttttattttaggtagttgagatagggcgggtagatttgcggtaggttttttttgagtacggcggtttggtagtcgagttgcgggagttcgttgaggtcgagtgtagggtagagcgcgggggtcgtttcggcggcggcggtagaggcggaggtggagggtaggtcgtttcgcgggagtaggtagtcgttcgcgttcggcgttttgtagggcggcggcgcgaacgggttttgttggggcggcgcgtttttcgttttgtataggatgtattttagggtcgatttcgaggaggacgtagacgagattgaggtattggcgggtgcggtcgttatcgtcgttttttcgggtttggatggggtcgttcgcggcggtagcgggggcggtggttttaacgggaaattcgggaaggttgcggggttggtatcggttataaggtaggaacgcggggagcgcgcggaggttttcgcgttttttttttttttttttatttttagagcgggcggttggaagtcgttatagagagggtacgcgtcgtttttgggttcggcgtcgggcgggtacgcgtagtcggggaagtcgtttatagcgatcggggtggacgaggtatagggtgaatttcgcggcggggtaaaggcgttggtagtttcggtttcgtcgtcgtaattttcgttttttagtagttgtcgagtgcgggttgttaataaggcgtgattgagaggtaggataggtacgtggatgaaatttattatcgtggtggttagcggggacgtttcggacgatcggcgcgttttgttttattagggcgattttgggcgttgagaagcgggaattttttttggggattagggcgacgttttttgttgtcgtttcggcgggatagtcgcggttttttttttagtcgtcgcgttatttagagttcgaggtttgttttttagaagcggattcgtagatttttcggatttagagttatttttttttttaatttttatcgtagcggtttgcggagacggttttattggggtttcggattagtgagggtttttagaggtcgggagtagtagttgtcgggttggtgataggtttcggggtagtattttatgggtagttgtcgtttcggagttgtttttaattttgtattcggatcggtttatgagcggggataatattcgttgggtggcgggggtagtcggtggattttcgggaagttcggggttaaataggtattaagagttggtgatttcgtaggcgggagggttgggttggttttgttcgggatttgagggcgttaatagagtgtttaagatattgtttagtagttcgttgtttttttttgggggattagaattgttgtttttagtattttttgtagttttagttttggaatatgcgttttttacgttcgatagcgattgttggttttgcgttttttcgtcggaggggttttgtttttggtagggtcgagggaagagtagttcgtttagggagataggtatggtcgaaattttaggtaaggtgttcgaggtttggtttttcgggaacggatttgcggttgggcgatatagtagtggggattcgatttcgggggagggcgggtcgttcgttacgtggggagttcggggattttttgtttttagtttagttatgacgattggatttttttttttttttttttcgtttttagggaggagggaaaagggaaggaggagggggtttcgggaatataggggtagagggaggagaaagtgggtgttgaatgtggttggatcggagggatttttattttttgggtcgggggcgggggagggcggcgttggttagtttttgtttttggtttttattttgtcgttaggggaattgtggttgtcgtttgttttagcgagcggtaagtggggagcgtaagaaaaagtagtaattgttaggagatttcgttttttaattcggggagttttttaagagagttttttaatttttgttcgaggattggagacgtagagtatttataagttcggtatttgagtggttgcggttgcgacggtaatttagtgatacgcggtttttttatttttcgattttttttttggtattaaattcgtgtatgttgtgaagtttttagtttttcgttgagttttattgtttttttattaaaattttggggttagtcggatttttcggtatagtttatttttaggaagggtcggatttttgttggtttcgtattgcgggcgatagttattttcgaagattttagattttagtagtgcgggagtattagtcgtttcgggttgtagattttatttaaatgataagtgaagttagtttttattgagaatgttatttatacgtataaatataataaggtttatttcgattagtgatagttgtggattggttagatagttttttaataacgtttttttttttagggaggtttcgtttaaagtttttttttattttaattatcggtaggatttgaaattttggagttggtatttttattcgttattttgaatgttatttttaatagtaggttttttgggatggaattttataagtatattacgttttgttttgtaaattaagaattatgttttatttaattggaaaaatgaatagattttattagaagtagaatttttgttattattttaagattttagttttgtaaagatttaatatagaggaagatatttggttatattattttttaaaataataaatgtattaaggacgatattaaaataagaaatttttttttttatgagttttataaaagtgaatgtttttaagttttttttgttgcgattaatatgttttgttttttttgagtatttttagcgtgataaagaaatttgggagtgggagatggtaatatttttgtatttatgatggaagtttggatgttgtgtgttatatttcgatttgttttaaggaatgtgttttaatttttagtaaatagtattttaaggaaagttttttttagttttagtttatatagtgtgttatattataatatttttagtagagatgttgaatagtattttttattttaaatatttttagtttgaaaagtaattatttttgagtttataaaatggattttcgttaaatttatgaagttagtagaaaaagggaagaatattgtaatatatattttagatatatagttataaattgtatttgatttaagattattgggtattttaatattattttaaatatattttgtttaaaatagagtgaatgatttgtaaatttttttgtaggattttaaggtttagttgtgttaatgatttatagtttattttaattatgtataaagaatgtagaagattttagaaggtgggggagttattagaggtaaggagtttggatttttcgattatttggggaggggttatatgagtgagaaataaatttttattatgttaggttattaggatttggagttggttgttttagtaaatagtttattttgattaattttagatatgtggaagttaggtagatagaggaaaggtaaagagaattttgggaagtaggtatagaatgtttatcgggtattaaatggtaggatataatatggtaattgtaaggggattattatgaatagaataggagtaagtgtgggtatagaagtatatgagattagagaagtaaattaatttattaatattattattgttgtttttaggttttttttttttagtttattttaaaatagttattatgttttattgaggtgtaattttagtattatatagtttatttaaagtattagtttattgattttttatgtatttagagttgtgtaattattagtattattaattttgtaatatgagtatgattttaaaattttaatatttattagtagttattttatattttcgtttaaattttttagtagttattaatatgttttttgtatttgtgatttggttattttggattaaggtttatttatgttttatatgaattagtattttatttttttatttttttttattgataaataatattttattgtatggataaattatattttatttatttatttttattagttgttggatatttgggttgtttatattttttggttattatgaaaaattttgttaatgaatatttatgtataagtttttgtgtagcgtatattttttttttttttggatatatgtataggagtggaattgttggtttatatggtaattttaggtgtggtttttggagtaattgttagattatggtttaaatgattgtattttttatatttntattagtagtgaataagggttttagtttttttatatttttgataatattttttatttgttttttttgttatagttttttaagtgtgtgaagtggtattttattgatttatttatatttttttgatggttaatgttatatagtgtatagaatttgtaaaattaggatagtattgttaggtagttttgtaagttttttatttgtgttaattgtaattttttaatagttttataaaataggtattgttattttaattttatagttgggaaaattgaggtataaggttatttagtattataaagttaagtattgtaatttaaatttaagatattaaatgatagtttttttaggagtgtgattttaaatgttagatgttatataatttgatttttcggtcgttgttgtaaaattggtatttggttttattttaaatttgataaattatatttggtttgattttggttggttataataatttttttgttagaatgtttggggaggttgtttttaaaagattgaaaattttgaagtgggaaaataataataaagatgtttagtatgttttaaattattattattttataaattttgatgttgggtgattagtatttttggtataggaattttttaaatgtatgaatttttgaatgaataaaatttattgattaaatttaggtgtgatggggttaattttaaatatttttgaagattgtttttggagaagaggatttaaatgtggaagtattttttttatagtttggggaaaaaaattattttattaagatatagttgttatataataagttgtatatatttaaattgtataatttgttgttagatttgtgaaattaaaatgataaatatattttttgtttttaaaagtttttttatgttattttttaaatttttttatattgttttgttttattttttttttttagtattaattattattttttggtaagttattaatttgttttttgttattaaatattaggtttttaaaaatatttatatttgatttattaaatattaaattatatatttgtatatgttttttaggtttgtttgttttagatgttttattaatagattttatttttgggaaacgattttggatttatagaaaaattgagtagataatatagagaatgtttatatattatttgtataattttttttgttagtattttaaattaatagggtatatttgttataattaatgaattaatattgataaattgttattaattaatatttatagtttatttagattttttttatttttatttaatgtttttttttttttttaggattttatttaggatattatatttaattgttatgatgttttgtgttttttttggttgtgagagttttttagattttttttgtatttgatgattttgatagtttttaggagtattggtgaggtatattgtaagatgtttttttattgggatttgatgtatttttatgagtagattagggttttgggttttggcggggtggaaattaaagaggtaatgtattgtatttattatattatatgaagggtatatattgttaatatgatttatgattgttaatgttgttttttattatttggttgaagtagtgtttgttaggtttttttattgtatagttatttttttttttttttttgtatattttgtattttttggaaggaaattattatgagttatttaaggaagtgtgggggagtagggagttatgttagtttttttttggagtggagtatttatataatttatttggaattttgtgaggaagatttgtttttttttttttatttatttttttatttagttttttttttgtatggatttatgaatattttgttgtttaaatttttttagtttttggtattgggggtttttttagttgatttttgtgttttttgatttattttttgtattgtgtgtatgtgtgtgtatgtgtggatttttttattttttggtattataagatgttatagatttattagatttattttgtatattttttgttttagtcgtagaattagttatttatttaaggaagtttgagattttttatttgaaattggtatagaaatgaagatttgggtgttaaataaattaggttttattttttagaattgtatataatatagtgtattttttttttatttggttttttttatttagtataattattttgagatttagttaaattatagtatgtattaatagttaattttttttattttttttatttatatattatagtttgtttatttatttaattgtggataaatatttgagttgtttttaatttttttggtattataaatagagttattatgaaaatgttgtataagtttttgtatgaatatgtgtttttattttttttgggtaaatatttagtagtgaaatggttggataaattagtaggtgttgtgatatgagtgtttgtgttttttttaaatttgtgtgttaaaatttaattattaatgtgatagttttagtaggaggaggtgttggggagtgattaggttatggagt

SEQ ID NO: 73 - DNA, 9021 bp, Artificial Sequence
  chemically treated genomic DNA (Homo sapiens)
tgtttagtttagggtttgtgaatgtacgaatcgatattttgtatttagttattttggtggggaggtggagaatttttgtgtttagtttagggattgtaaatatattaattagcgttttgttaaaatagattattcggttttattaattagtaggatgtgggtggggttagataaaagaataaaagtaggttgtttgagttagtagtggtaagttgtttgggtttttttttatattgtggaagttttgtttttttttgtaataaattttgttgttgtttattttttgggtttatattgtttttatgagttgtaatatttattacgaaggtttgtagttttattgttgaagttaatgagattacgaatttttcgggaggaatgaataatttgagacgcgttgttttaagagttgtaatatttatcgcgaaggtttgtagttttatttttgagttagcgagattataaatttattagaaggaagaaatttcgaatatatttgaatattagaaggaataaatttcggatacgttatttttaagaattgtaatatttatcgcgagggtttacggttttatttttgaagttagtgagattaagaatttattaatttcggatatattagttattagggaggttgaggtgaggggattatttgaatttaggaagtcgagggtgtagtgagtcgagattatgtcgttatattttagtttgagtgatagagtgagattttgtgttaaaaaaatagaataaaataaaataagaacgttgaataggttgtgtgttaattttgagatggagtttagatttaagaatgattttgaggtttagatttatatttaagaggatgattttagtttggtatttataggttttttaggtattttagatgtattttgttttgaattaagttttttgtttttgaatttgttttttttggtaaatagtattaagggggttagaaatttgggggttgtttttatttttttttttttattatgtatttttaatgggtggttggatttgtggttgtattttcgtgattttttagtttttttttagtgatggttttaggtgggtttttattttgttttttaaatggtttttttgttttgagttttattttatttgtttttagtttatttattgagttattttagagattattttgattttttgtggatatttttttggtggttttttttttttgttagttagaaattgtttttgattgtatgtaataaatgtggttacgttatttaattaaataaaggtttatttttttcgtgatgaaaagtatatagataagtagtttatttttatcgataattattgagggttttttatgatttttatagtaatgaaatgtgtatttatagtataaagatatataattttaaggttttaatataattgggtttaagtatagtattttttgttttagtttttaattgtttaggtgattttattgtgtagttagggttgataaatattgtatttaggtttagtgtttttgatttgtagttgaggtttagagagaattattgaaattgtagttttagttatttgggaggttgaggttggagaattgtttaagtttagcggggtgaggttgtagtgagttaagattgtattatcgtattttagttcgggcgatagagtaatattttatttaaaaaaaaaaaaatttttggtttatttttttgtttattttttaattatagaggtttttaaatatgaatttttatttttaggaaggttgaaatgatatattataagcggtttagttatttgtacgtgtcgttatttgatttaaggtatttatttttttttattatttttgataaagttgaattgtttatatgtgttatatttttttttttttttaattttttttttttttttttttttttttttttttttttttttttttttttttttttttttttttttttttttttttttttttttttttttttttttttttttttttattttttttttttttttttgatagggtttgtttgttttgtttttttaaattttggggtttaagtgtaaaggttttttttatttgatttttttattttattttatttaagttagatattttacgatgatgatgatgattattgttgagataggattttattttgttgtttaggttggagtgtaatggtgcgattataatttattgtagttttaattttttgggtttacgcgatttttttattttagttttttaagtagtttggattataggggtgtattattatgttcggttaattatatgtgttagatttaatttacgttttagggttttaaataattaaggttttattattttgttttaataaatatatttttataaagatttggaaggtaggttgaaatgtggaatttttggattttttttagttttacgtagaagggtagtagtggagagttggttgtttgttcgtttttggtttttttttttttttttatttttgttttttgtggtattgggtagggtttacgtttaaggttagtagtgtatttaataagggatagtttttgtgtggtttgtttaggattttatatataggtttagggttttttgggtaggaaattttaggattcgggtatttaagtggtgttttaaatagtggtttttggtcgggtgtggtggtttatatttgtaattttagtattttgggaggtcgaggttggtagattatttgaggttaggagttcgagattagtttggttaatatggtgaaattttatttttattaaaaatataaaaatttagttaggtatggtgtgtacgtttgtagttttagttattcgggaggttgaggtaggagaattatttgaatttagtaggcggaggttgtagtgagttgagattgtattattgtattttagtttggtgatagagtgagattttatattaaaataaatatataaataaataaaaatagtgatttttaattgggagtgatttggtaacgtttggaattatttttggttattttagtttggtagggagggatagggtattattggtatttagtgagtaggggttagggattttattgaatattttatagtgtataggatagtttttatagtaaagaattgtttggtttaaaatgtttatagtgtttatattcgatgttttgtattaggaagatataaatatttttaaatattatagagttaaattttttatttttgttttagtagagatgatatttttgcggggggagtatttttttggttttaatatatttttttttttatgggagatgatgttagaagagggatagaataggacgattattttacgaaggtattatttaggtattattagatcgttttaaaagaagagtaatttattgttttaaagtagttttttcgtgtttgtgggcggattttttggtaagtttataatgaattgaaatttgtcgaattttttggaatttaaagaaattttagttttgggtaaaggttttttggttagtatttgtattgtttatgtaatcgtttagaatatacgaattatttggagattattattaaatataataggtaaaattgtaaatatgtatattttttagaggatgataaaaaaatgtgaattgtatttttttgatagaggatgtattagagtttgagggtttaaatagcgtaaataataaataagtaaataaatcgatagtagtgtattttaaacgaggttggaatagtttttattgttgttttatattggattttaattaagttttagtattttgttatatttaatattaagtattaggttggacgtggtggtttatgtttgtaattttagtattttgggaggtcgaggtgggtagatggttggtttgagtttaggagtttgaaattagtttgggtaatatggtaaaattttatttgtatttaaaatataaaaattagttaggtgtggtggtatatgtttgtggttttaggtatttgggaggttgaggtaggaggatggtttgaatttaggaggtggaggttgtagtgagttatgatggcgttattgtattttagtttgggtgatagagcgagattttgttttaaaaattaaataaataattttttcgtttcggataaaagtagtttgtattatttttttattttataatatgtttttgaaatattttttttgaaaggtaagttatatttattatttttgttgtatggaggtattataaattattttattattttattttttttgagtgttgtggtttttaggttagataaaaacgtaggtgatgtttagaagttaattagttgtcgtttggttatttgtagggttgtggttttgttaaataggaaaaatataaaaagaatatcgaattttgttaattaaataagaaattttatattaaggattaagaaaattgtaggggaagaaaaggtaagtttcgggattgaggtgtagcgattttttatatttttagaaaattaaaaaataagataaaaaaatgaaaattataaaagtatttattttggggcgttttaattgttgagtaataaatgagacgttgtggttaaatttagttataattaatgatatttttagataaagtgattttagatttttaaagcgtattttgtttatattattttgttaatttcgcgtattgtaatcggcgggttacgttttcgtgaaaagaaggttgttttttttatatttcggggttttggacgtttttcggttgcggggcggggggagttttcggcgtacgcggttttttggtttcgtttttagttattttcggttattcgcgattcgaggttgtcgtagggggcgggttgagcgcgtgcgaggcgattggtttggggttagagtgggcgaggcgcggaggtttggtttataaagtagtcgcggagacggggtgttggtttgcgtcgtagttttttgtagcgtttggggttttcgttgtagttttcggaattaggatttcggcgtggtttagcgagttatggcgacgaaggtcgtgtgcgtgttgaagggcgacggtttagtgtagggtattattaatttcgagtagaaggtaagggttgggacggaggtttgtttgcgaggtcgtttttattcgttcgttttttcgcgtatttttgttaggagcgggtcgttcgttaggtttcggggtcgttttggtttagcgttcggtttcggttcgtgtcgttcggtcggtgttttcgtttttagcggtgcggtgtttaagtgttgagttatcgggcgggttcgggcgcggggcgtgggatcgaggtcgtcgcggggttgggtttgcgcgtggcgggagcgcggggagggattgtcgcgggtcggggaggggcgggggcgggcgtgttgttttttgtggtttttgggtcgtcgtcgcgggtttgtcgtggtgtttggagcggttgtgttcgttttttgtttggtcgtgttttcgtttttgagggtttcgcggatatcgagtggcgtagtgttaggtttagttcggggatggcgattgcgtttgggttcgtttggtgttttcgtattttttttcgtttttcggttttagcgttttaggttagggagttttcgtttttgtatagttttaaggttaggaatggtttttatatttttaaaaggttttggaaaataaaaatacgtaatagagatcgtttgtgtgatattttgtagggaagtttgttggtttttgttttaggttatgattgggttgtaagggtagagaaggtagttttgaatagaggttttttttttttttttaagtttcgggagttagaggtttaattgatttttttggggatttttgagggtagtgattttaattttgggtgtatagttagtttatttgaagattttattaaaaatatattagagtttaattttcgattaattatattaaaatttgttttagtgtagggtgagtattgttgttttttgaaagtttttaaaagtgattttgatgtgtatttacgattgagaattgtcgtttgaggatagtgggtggagtttcgtatttggaaattagaagatttggagtttttattatatcgaattggtatttaataattgttgtcggagtattttttaagttatattttcgtaaagtggttttaaaattgttttgttagtaggtaggttgttaagatggttagagataaatttttgaacgatttttgtaaaatatatagaaatatttttagaatttttattagtaaaattataaaacgtgttgtaaggaaggtgtttgtgataatattgtttttagaattttagtgaagttattaattggtggaaaatttttttttgtattcggtttaaaaattatgagggaatatttattatacgaatgagatttagtttttaaaggggtttatagaaacgtgagaggataggaatagttagtttgtgtaaatgtttgaaatatatgtgagggagataatgagtttagtttttttttttaataggtttttagattttttggaaaaggttttttggtatttgattttattttgttgttttatttgttagatttttttttgtttttttttatttttttttatataatttattagtattagtgttttgttttttagattaagtttcgttttgtcgtttaggttggagtgtagtggcgcgattttagtttattgtaattttcgttttttaggtttaagtaatttttttgttttagtttttcgggtagttgggattataggcgcgcgtcgttacgtttggttaattttttatattttagtagagacggcgttttattatgttggttaggatggtttcgatttgttgacgtcgtgatttattcgtttcggttttttaaagtgttgggattataggcgtgagttatttcgttcggttattagtgttatttttaagacgtttttgaggaattttttttttttggttattgagaatttatgtatgaatttaggttttttattttttttgagtagtttgtatagtttttttttttaagcgtttgatttcgttttgtttggtgttcgttgtatttgagaatgagttttggatagtggagtattttagttttttagatatgtagagataatatattggttattagttatttggtttggtttatttcgtgtttaaaattttggattttttgttagtttttatagattagaattttttacgtattaatttagtttttttagttttttttgaagaatttttggagatttttttatattgagtttttattagtttaggatagtattgttgtagtagtttatatattttttcgttttttaggtttgtgttatttatttaagtttatagtttggtttttgtagggttgtattcgagtatagttatttagatgttttgaatgtattatcggttaaatggaggttttaaagaatttgttgtttttggttttgtgtttttgataatagagtgtttgagggataatttttatatttgagtttttttaaaattaaaggttgtagaagagttatagtatttattgttaaaaagaaaagaatttaaaaaggtagtaattgttaggatattttatttgagtaatgatattttttagtggaaagttatattttaagggttaatgttttttaattgttggtcgtatttgaaaataaattaagttaaaaataagagatattgatatgttgtatgacggtgtggtgtggatgttgtgtttattttagttttgagatttagttgtaatttttttgatttttgtatgtagttacggagtattattatttgttattattatttgaatggttatattgtttgtttttattttggtagagtggaaaggttatttaggttttagtgtttgaaaagattttagaaagtagtagtacgtttggttagattagaattagtttttttttgggggtagtggaatataatattttttgattgttaattaaaaatatttgtgatagtcgggcgtggtggtttacgtttgtaattttagtattttgggaggtcgagacgggtggattacgaggttagtagatggagattattttggttaatacggtgaaatttcgtttttattaaaaatgtaaaaaaattagtcgggtgtggtggtgggcgtttgtagttttagttatttaggaggttgaggtaggagaatggtatgaatttgggaggcggagtttgtagtgagtcgagattatgttattgtattttagtttgggcgatagagcgagattcgttttaaaaaaaaaaagaaaaaaatttatgatggatatttaaaaatatttattgagtggggagtggagagtaggggttttagggtagtttgttggatatttttagggcgattttttttttttttttttttaaagttaagtgagtatgttatatggaaaagggtgtgcgtggagaaaaagtaaggggttttagagtgtaggatgagatatatattttttgggttaaaaaggttgaggtaggagaatggcgtgaattcgggaggcggagtttgtagtgagttgagattatgttattgtattttagtttgggcgatagagcgagatttttgttttaaaataaaaaacgtttatatgtatatgtatatttaatatgtataaatataatttatttaaaagtatttattatataaataggtatttatattatttatttattgtaatagttaaagtttatgaagtatttaatattgatgtgtaggtatttattttgtttgttattttattaggtgttttttatgttatttaattatgaagtttggttatagggtgtttgtgtattgagtgtgggaataagattattattttttttttgaggatataggtttagagtagttaagtagtttgttggaggtttattggttagaaagtggttagtttgggatttggatatagatttttttatttttaagtttggttgttttttattttattgtgaggggtaaaggtaaattagttgttttttttgtttagaaattttttttaattttgtattttttttaaagg

SEQ ID NO: 74 - DNA, 9021 bp, Artificial Sequence
  chemically treated genomic DNA (Homo sapiens)
tttttaagaaaagtgtaaagttggagagagtttttgaataaagaaaatagttgatttatttttattttttatagtgaagtaaaaagtagttagatttgggagtggaaaaatttgtgtttaaattttaggttgattattttttagttagtgaatttttagtaagttgtttaattgttttaggtttgtgtttttaaaagggagatggtaattttgtttttatatttaatgtataagtattttgtggttaggttttatgattaaataatataaaaagtatttaatagagtggtaagtaaagtgagtatttatatattagtgttagatattttataggttttgattattatagtaaataggtaatgtaagtatttatttatgtagtaaatatttttgaataggttatatttgtatatgttgaatatatatgtatatgtaaacgttttttattttgagataagagtttcgttttgtcgtttaggttggagtgtagtggtatgattttagtttattgtaagtttcgtttttcgggtttacgttatttttttgttttagtttttttaatttaaaaggtgtatgttttattttatattttggagttttttgttttttttttacgtatatttttttttatatggtatatttatttgattttaaaaaaaaaaaaagaaaaagtcgttttggaaatgtttaataggttattttgggatttttgttttttattttttatttagtgagtgtttttaagtgtttattataagtttttttttttttttttttgagacgagtttcgttttgtcgtttaggttggagtgtagtgatatgatttcggtttattgtaagtttcgttttttaggtttatgttatttttttgttttagttttttgagtagttgggattataggcgtttattattatattcggttaatttttttgtatttttagtagagacggggttttatcgtgttagttaggatggtttttatttgttgatttcgtgatttattcgtttcggttttttaaagtgttgggattataggcgtaagttattacgttcggttattataggtatttttaattagtagttagaaaatattatattttattgtttttaggagaggattgattttagtttaattagacgtattattgttttttgaaatttttttaagtattgaaatttaggtaatttttttattttattaaaatgaaagtaagtagtatagttatttaggtaatggtgataggtaatggtgtttcgtggttatatatagaaattaaggaagttataattagattttaggattaaaataaatataatatttatattatatcgttatataatatgttagtgttttttgtttttagtttggtttgtttttaaatacggttaatagttaaggggtattaatttttaagatgtgattttttattggaaaatattattgtttaaatgaagtattttggtaattgttgtttttttaaatttttttttttttgataatagatattgtgatttttttataatttttaattttggaaaaatttaaatgtgaaagttgttttttaaatattttgttattaagagtatagggttaaaaatagtaggttttttgaaatttttatttaatcggtaatatatttaggatatttaagtagttgtgttcgggtataattttgtagggattaggttatgaatttaagtgaataatataggtttgggaagcgaaaaaatatatgaattgttatagtagtattgttttgggttaatgaaggtttagtatgaagagatttttaaaaattttttaagagaagttaggaaaattggattaatacgtgaaaaattttgatttgtaaaaattagtaaagagtttaagattttaaatacggaataggttaagttaagtagttgatagttaatgtattatttttgtatatttggaaagttggaatgttttattatttaaggtttatttttaggtataacgggtattaaataaaacgaagttaggcgtttaaaagaaggaattatgtaagttgtttagggaaggtggaaaatttgggtttatgtatggatttttaatggttagggagaagggattttttagaggcgttttaagaatagtattggtggtcgggcggggtggtttacgtttgtaattttagtattttgggaggtcgaggcgggtggattacgacgttaatagatcgagattattttggttaatatggtgaaacgtcgtttttattaaaatataaaaaattagttaggcgtggcggcgcgcgtttgtagttttagttattcgggaggttgaggtaggagaattgtttgaatttgggaggcggaggttgtagtgagttgagatcgcgttattgtattttagtttgggcgatagagcgagatttggtttgaaaaataaaatattagtattggtgaattatgtggggagaagtaaagagggataaaaagaagtttgataaatgaaatagtaaaatggagttaaatgttaaagaattttttttagaaaatttggagatttattaaagaaaaaggttaaatttattattttttttatatatattttagatatttatatagattaattgtttttgtttttttacgtttttgtaaatttttttaaagattgaattttattcgtatagtaaatatttttttatgatttttaagtcgagtgtaagagaaaattttttattagttggtaattttattaaggttttggggatagtgttattataagtattttttttgtaatacgttttgtaattttattgataaaagttttgaaaatatttttgtatattttataagagtcgtttagaagtttgtttttgattattttagtaatttgtttattggtagagtaattttaaagttattttacgaaaatgtggtttaagaaatgtttcgataatagttattaagtgttaattcggtgtaatggaaattttaggttttttaatttttaaatacgaaattttatttattgtttttaaacgatagtttttaatcgtaggtgtatattaaaattatttttggaaatttttaaaaaatagtaatatttattttgtattaggataggttttgatgtaattggtcggaggttgggttttggtgtatttttagtaagatttttaaataagttaattgtgtatttaaagttaagattattgtttttaaaaatttttaaaagggttagttaaatttttggttttcggagtttaggaggaggaaaaggatttttgtttaaggttattttttttgtttttgtagtttaattatgatttagaatagaggttagtaaatttttttgtaaagtgttatataaacggtttttgttgcgtatttttgttttttaaagttttttaaaaatataaaaattatttttagttttagagttgtataaaagcgaagattttttgatttagagcgttgaagtcggaaagcggagagggatgcgaagatattaggcgggtttaggcgtagtcgttattttcgggttgggtttggtattgcgttattcggtgttcgcgggatttttaggaacgagaatacggttaagtaagggacgagtatagtcgttttaggtattacgatagattcgcggcggcggtttaaggattatagagggtagtacgttcgttttcgttttttttcggttcgcggtaattttttttcgcgttttcgttacgcgtaggtttagtttcgcggcggtttcggttttacgtttcgcgttcgggttcgttcggtgatttagtatttgggtatcgtatcgttgggggcgaaggtatcgatcgggcggtacgggtcgggatcgggcgttggattagggcggtttcgaggtttggcgggcgattcgtttttagtaaaggtgcgcggggggacgagcgggtgggagcggtttcgtaaataagttttcgttttagtttttgttttttgttcgaaattgatgatgttttgtattgggtcgtcgttttttagtacgtatacggttttcgtcgttataattcgttaggttacgtcgaggttttggtttcgaggattgtaacggaaattttagacgttgtaggagattacgacgtaaattagtatttcgttttcgcgattattttataggttagattttcgcgtttcgtttattttggttttaaattaatcgtttcgtacgcgtttagttcgttttttgcggtagtttcgggtcgcgagtggtcgggaatgattgggggcggggttaaggggtcgcgtgcgtcggagatttttttcgtttcgtagtcgggaaacgtttagaatttcgaaatgtggagaaaataattttttttttacgggggcgtggttcgtcggttgtagtacgcgaaattggtaaaatgatgtaaatagggtacgttttgaaaatttgaagttattttgtttagaaatgttattagttatgattgagtttggttatagcgttttatttgttatttagtaattgggacgttttaagatggatgtttttgtagtttttatttttttgttttgttttttagttttttgagggtatagaaagtcgttatattttaatttcgggatttattttttttttttttgtaatttttttagtttttagtatagagttttttatttggttggtagaattcggtattttttttatattttttttgtttggtaaggttataattttatagataattaaacggtaattagttggtttttaggtattatttgcgtttttgtttggtttaaaggttataatatttaaggagggtagaatggtgaaataatttatgatgtttttatataataggaatgataaatatgatttattttttaagggaaatattttaaaaatatattgtgaaatgagaaaatagtgtaaattatttttgttcggggcgagggggttgtttgtttgatttttgagatagggtttcgttttgttatttaggttggagtgtagtggcgttattatagtttattgtagtttttattttttgggtttaagttatttttttgttttagttttttaagtatttgggattataggtatgtgttattatatttggttgatttttgtattttgggtatagatggggttttattatgttgtttaggttggttttaaatttttgagtttaagttagttatttatttatttcggttttttaaagtgttgggattatagatatgagttattacgtttagtttagtatttaatattgagtatggtaaaatattgagatttaattgaagtttagtgtgaaataataatagaagttattttagtttcgtttggagtatattattatcgatttatttatttatttattatttacgttatttagatttttagattttaatgtattttttattagagaaatataatttatatttttttattattttttaggaagtatatatatttgtagttttgtttgttgtatttggtagtagtttttagataattcgtatattttaaacggttgtataaatagtgtaaatgttggttaaagggtttttgtttaaggttaaagtttttttgggttttaggaagttcggtagattttagtttattgtaaatttgttaagggattcgtttatagatacgagagagttgttttgggatagtgaattattttttttttgagacggtttaatgatgtttgggtggtgttttcgtaggatggtcgttttgttttgttttttttttggtattattttttatggagaaaagaatgtgttgaagttaagaagatgtttttttcgtaagaatattatttttgttagaataggggtaaggaatttaattttgtgatatttaagagtatttatatttttttaatgtagggtatcgaatgtgggtattatggatattttgggttagatagttttttgttgtggaggttgttttgtatattgtaggatgtttagtagaatttttagtttttatttattagatgttagtaatattttgtttttttttgttaggttgggataattaaaaataattttagacgttgttaaattatttttagttaagaattattgtttttatttatttatgtatttattttgatatggagttttattttgttattaggttggagtgtagtggtgtaattttagtttattgtaattttcgtttgttgggtttaagtgatttttttgttttagtttttcgagtagttgggattataggcgtgtatattatgtttggttaagtttttgtatttttagtagagatggggttttattatgttggttaggttggtttcgaatttttgattttaagtgatttgttagtttcggttttttaaagtgttgggattataggtgtgagttattatattcggttaagaattattgtttagaatattatttgagtattcggattttggaattttttgtttaaagagttttgagtttgtgtataggattttgaataggttatatagggattgttttttgttgagtatattgttagttttgaacgtaggttttgtttagtgttataaggagtaggggtggggaaaggaggaaaggttaggggcgggtaggtagttagttttttattgttatttttttacgtagaattgaaagaagtttaagaattttatattttaatttgttttttaggtttttatgaaggtatatttgttaagataggatgatagagttttggttgtttggaattttggaacgtgggttgaatttggtatatgtaattagtcgggtatggtggtatatttttgtagtttaagttatttgggaggttgaggtaggaggatcgcgtgggtttaggaggttgaggttgtagtgagttgtgatcgtattattgtattttagtttgggtaatagaatgaaattttgttttaataataattattattattatcgtggagtatttaatttaaataaaataaaatagggaaattagatgagagggatttttgtatttgaattttagggtttaaagaagtagaataggtaaattttgttagaaagaagaaaagagagtgagagagaaagagaaagaaagagaaagagagaaagaaaaagaaagagaaagaagaaggaaggagggagggagggaagaaagggaggagggaaggagggaaggaattagagaaagaggagaatgtggtatatgtagatagtttaattttgttaggaatggtgaggaggaatagatgttttaaattagatggcggtacgtgtagatgattaaatcgtttgtaatgtgttattttagtttttttgagagtgaaaatttatgtttggggatttttgtggttaaaaggtgggtaaaaaggtagattagaaatttttttttttttagatggagtgttgttttgtcgttcgggttggagtgcggtggtgtagttttgatttattatagttttatttcgttgggtttaggtaattttttaattttagttttttaagtagttgggattgtagttttaataattttttttagattttagttgtaaattaaaggtattgggtttagatgtagtgtttattaattttggttgtataatagaattatttgggtagttgaaaattaaaataaaaaatattgtgtttaggtttaattatattaaaattttaaaattgtatatttttatattgtaaatatatattttattgttgtaagagttataagaaatttttaatggttatcgatggaagtaggttgtttatttgtgtattttttattacgagaaaaataaatttttatttggttaaatagcgtaattatatttgttatatgtagttaaaagtaatttttaattgatagagaggagaagttattagaggggtgtttatagggagttagaatggtttttggaatagtttagtgggtggattgagagtagatggggtgagatttaaggtagagaggttatttgggagataggataagagtttatttaaggttattattggaagaaagttgggagattacggaaatgtaattataagtttagttatttattagaggtgtatggtgagagagggaaggtaagggtagtttttaggtttttagtttttttggtgttgtttattaaggaaagtaggtttaaggataaagggtttaatttaggatagggtgtatttgaagtgtttgaagaatttataagtgttaggttggaattatttttttggatatgggtttaagttttaggattatttttaagtttggattttattttagaattaatatatagtttatttaacgtttttgttttattttgttttgtttttttgatataagattttattttgttatttaggttggagtgtaacggtatgatttcggtttattgtattttcgattttttggatttaggtgatttttttattttagtttttttagtagttggtgtgttcggaattggtgggtttttggttttattgattttaagaatgaagtcgtggattttcgcggtgagtgttatagtttttaaaggtggcgtgttcggagtttgttttttttgatgtttagatgtgttcggagttttttttttttggtgggtttgtggtttcgttggtttaggagtgaagttgtagattttcgcggtgagtgttatagtttttaaggtagcgcgttttaagttgtttatttttttcggggggttcgtggttttattggttttagtagtgaagttgtagattttcgtggtgagtgttatagtttataaaggtagtgtggatttaaagagtgagtagtagtaagatttattgtaaagaaagataaagtttttatagtatggaaggggatttaagtagtttgttattgttggtttaggtagtttgtttttatttttttatttggttttatttatattttgttgattggtagagtcgagtggtttgttttgatagggcgttgattggtgtgtttataatttttgagttagatataaaggttttttatttttttattagagtagttagatatagagtgtcgattcgtgtatttataaattttgagttagata

SEQ ID NO: 75 - DNA, 6074 bp, Artificial Sequence
  chemically treated genomic DNA (Homo sapiens)
ttttagttttttatagttttttgatttttttttttttgattttttatatttttttttttttattttttttttgtttttgttaattattattattttatttttattaatattattaagtgtatttgtttgagtatttttgggtgtttgatttaggatttttttaggggtatttttgttggggtaatttttttagtttttagaagggtatggttgtgtggttgagattgttgaggaaagtagtaaagataggaggatagaattgaatgtaaagttattttgtttttaagtacgtttaatggaatggttttatagtagttgcgtttaattttgtgggtattgttattgtattttgtcgtttaggaagtttataaattatataatgttttttacgtggtagttatttggtggttttgagttttagagattttgatttagtattttgattaggatatggagttgtttggattattagtggaatattaatttttatattttaatattgggttttagagttattttgtgaaattttttttggaaaggaaagatttgagttttaattttaattttaatgtgtattttaaacgtaggtttgagagttgggggatggtagatgttaagtagaaggttagattaatttttggataatattggtaacgaaaattacgtaggtagttgagaataaagtaaatgttttttatttttttttatttcgtttattatgttggtgatgaaaattgtaaaaatgagtttagtataaggttttttatttttttttttggtaagagataaggaatatattaatagttaaggttttagagggagttgatatttagataatagatttttttttttaaattttttaatatattaaaatttttttattttttttaaatatagttttttagagtttttaataaaattttttttttttttttttatatatagatgatattttttttttgttttttttttgtattaggtgttttattttgttttttttttgagtttggttgtttgttgttgttatttaggaaggttttgtagttatttgaattagtttagttattgttttttggggtttgattgtgggaattgtaatttttttaatgttgggtttatggttgtgtttttttttaaagaatgtttgggttgtttaatttttagtattttgggtaattgttgatttaaaatagtaagtttagttggtttgaattatttagggaaggttttggtgtttatagttttataattatttttataaatgaattaggaaggaaggggaggttgattatagtgaagaagagggttttttaaatatattttttataataagtatgtaggagaaaggaaagggaaaattgatagggcggtttatcggtttttagtagagtataatatagtttttttgtttgtatagggaggagaggttgtgattggttttttatagaagagattatattgagtttaaggttagttgtagtaagtgtgtgtaaaggtagtttaggtagatttttagtgggaaggttatataattattaggttttacgtgtagagaaataggagttgtagtggttacgcgagatagatgtagtgtttgtaggtgaaggcgtatatttgagtttttatatagttttaaggggttatagttggaattttattcggtttagagagtgaggtgttttaatataaaatgttatattattttttaggaaaaatgattgttttgttttaaatcgcgttttgttaattttttttttattttttttatattatagttgagaaataattttatattttttgatttatttatgaaaatattttttataggaagaggtatgtacgtgtatgtatatgtatatgtttaagtaaagaagttgatatgaaaatgataatataaagatagtggtaaggaattaagataagggaaaggtgtgtttattgagggagtttttttttaaataataggtagttttgttgatgttaaatattatgttaagtatgtaaataaatttttgtatttagtatttatattaatttaatgagttaagtattatttttattgaaaatgtggaaatcgaggtagtatagtagagaagttagtatataagttttagaattagtttgttttgtttttaaaattaagttttgttttttattggttgtgtaattttgggtaagttattaaatttatttagttttgattttttttttataaaaggggatgggatttattttataagattattgtgaggattaaatgagatatataaaatataaaagatagagtattaataatttaggatattaggttttttttatgattaaacgtttaaaaattattttaatttagtttattaaaaaaatgatttttaagttaaaaaaaaaaaaaaaaatatttagtttttgatgatttgtttgatttgaatgaattggagggttataaaattatagatatggattagtttttgaaaattttggagggagaattaatgatttttaagtattagaatgtattttgatttggatattttttagtttgtaagatggtaagttatttttttttttttttttttttttttttttttttttttgagacggagtttcgttttgtcgtttaggttggagtgtagtggcgggatttcggtttattgtaagtttcgtttttcgggtttacgttatttttttgttttagttttttaagtagttgggattataggcgttcgttattacgttcggttaattttttttgtatttttagtagagacggggttttatcgttttagtcgggatggtttcgattttttgatttcgtgattcgttcgtttcggttttttaaagtgttgggattataggcgtgagttatcgcgttcggttattttttttttttttttttttttttttttgagatagagttttgttttgttatttaggttggagtgtagtggtataattttggtttattgtaatttttgttttttaggtttaagtgattttcgtgttttagttttttaagtagttgggattatagacgtacgttattatgtttggttaattttttgtatgtttagtagaaatggggggttttattatgttgtttaggttggtttcgaatttttgagtttaagtaatttatttattttagttttttaaagtgatggtattataggtgtgagttattatgtttggtttgtaagttattttttgatttaaaatattttttaattatgaaggaaattgatttgattttgttatttttttttatttttgattttgggggtaggggatagataagtagaaattgttgaatatgatttttagtcggttgggtagttattttttagttatagtgagtttgatttgcgtgttttagtaggaagtaaggagttaggtttttttttagttttggggaataggagaagggtgggggaatttttgatttttttttttttgtagttaaagtagattagtttagggaggagatagggaaattattagagtaggttaagattaatttgaaggaagtgggagttagggataatttattaaaggaagtgtatgtgtgttttgtatatgtatggggtggattaaggaaaagatttattttaaaagaataaagtatgtttcgataaatttattgaaaggaatgatttatattggtgttttttgtttaaatgttgagattaatggtttggtgttttttttttgaaattaggttgttttatttatatgaaataaattgggtagaggttaatcgtgagagtttgagtttttttaagtaaatagtaaaagattttttaggtttaatagtttttatttttatttttaaggaaagtggatttattcggagtacgtaggttagaggaggtaggagaagagggttagttcgtgagtttcgggtatttggagaatatgaatttttcgggtgtattgtttttatgagggttatcgaggaatttatggattttttatttttcgtttagaatgttttttttttattttttttatttttttaaattttagtattaggggttattttagagttataaattttgaaaggattatttaggtgattcgggtttatatatttttttttcggggtatatttggtggtaggttagtaggtttttggttttagttggtggtgttatataattagattcgttatagagatttattttttattagttttaggttagaagtacgaagattgattttaacgatgtggtttgtttgggaggtaaggcggtaggcgttgttagaattgatgggaattgtggtataggtgggaaatttggtttaataaattttttattgatttaggggattattttttttgagttaagttttggtaagcggtcggcgaaatttataggttttttttttggttgcgtttttagtttttagtttttttcgttttagagatgttttaggagcggtttttcggtgtaggtaacgggtgttcgggcggtttcgtttcgtcgtttagagtttggaagtcgttattgcggtttaggataattcggttacgcggtcggcgtcgatttcgtacgttggagttcgttgtcgtacggcgttggtagtcgggggtggtgtttgaagttaggcgttttttgttttttcgtcggttcgggtgttcggttcgcgtcgttaggttttgggattttaggtcgtttcgtttagtagttcgcgttttgttcggtgcgtttagcgttttcgttttttattttaaatttttattttttgtgtttttaggggggtatttttatcggggcgggaggggggggttagttgtgtttcggtcgtcgagtggcgaggaggtgacggtagtcgtttttttattttcgttcggcgggtagcgttgcggggcgagtgttagtagagaggcgttcggtttttttttcgttttttcgcgtcgggggtaggttttgtttagtttgcgtttttttttttcgtatcgcggcgtcgtttcgttattcgggtatcgtaggtagggtaggaggttggagagtttgttgttcgttcgttcgtaaaatggttttttcggttggatagttcgttttgttcgttttgggtacgtacgtcggttgcggcgttttttgcgtcgcgcgatattttgtttttttcggttttcgtcgagttttttttttcgggggtttttgcgttcgtttgggagagtggagagaagcgagtagttttaatgggttggcgtttgggaggtaaggggagttattaagaatgataaagaggggattgttcggtcgagcgtcgaggttttttcgggaaagtggttgtttgggtcgtgcgtgagaatatttgggaaggggaagcggagtgtgaacgggtttgaattttaattcgtcgtagttgtgtgtttgtttagatatatgtttatatttatttgtttatttggttgtttttaagttcggtttagtcggcgtcgttggcgtgtagattgggtcgtttcggaacgggggtcggcgtttaattttttggtcgggttttgtttgcgtttttttggtattttttgtttatttttaagttttagcgacgagtagagatgtttaagatcggtagaggcgttttcgatttttttttagagtttttgagttttgggggtaggttttggatttttgggcggattaatggtttttttaattaatttttttgggagaagtggtttcggtgttcgtcgagggtaggagcgaaattttagatcgagtgttgttagttttttttgagtatgtttttggaaatgaaggagggatgggaaaggtgaggggaagttaaatttttttttcgggtcgggtttgcggagcggtgcgttttttggcggtgaagtttaagggtttgtttggacgcggtgagggcgtagcgtcgcgcgttttttggttaatttttgttttttgtgttggtgggtttttttggtgttgagatagttgattaatagcgtaggtgttttggttattgttagtttttcgtgaagtgaattgttcgttcgatatgtttcgagtttaattcgtatagtatgcggttcgttgtagggtggttagagtttgtggaaagttatggaattt

SEQ ID NO: 76 - DNA, 6074 bp, Artificial Sequence
  chemically treated genomic DNA (Homo sapiens)
gagttttatggttttttatagattttaattattttgtagcgagtcgtatgttatacgggttaaattcggggtatatcgaacgaataatttattttacggaagattagtaataattaggatatttgcgttattgattagttattttaatattagagagatttattagtataaggggtaagaattggttaggaggcgcgcggcgttgcgtttttatcgcgtttagatagatttttgaattttatcgttaaaaaacgtatcgtttcgtagattcgattcgggagaggggtttaatttttttttattttttttattttttttttatttttaaggatatatttaaaggaaattggtaatattcggtttagggtttcgtttttgttttcggcggatatcgaaattattttttttagggaagttaattaaaggaattattaattcgtttaaaaatttaaaatttatttttaaagtttaagagttttgaaaagagatcgagggcgtttttgtcgattttgaatatttttgttcgtcgttggggtttagaggtgggtagggggtgttaaaggggcgtaggtaagattcggttagagggttagacgtcggttttcgtttcgaggcggtttagtttatacgttagcgacgtcggttgagtcgggtttggaggtagttaggtaagtaggtaggtgtaggtatgtgtttgagtagatatatagttgcggcggattaaagtttaagttcgtttatatttcgttttttttttttaggtgtttttacgtacggtttaggtagttattttttcggggaagtttcggcgttcgatcggatagttttttttttgttatttttaatgattttttttgttttttaggcgttaatttattgagattattcgtttttttttatttttttaggcgggcgtagaaattttcggaaaggggaattcggcggggatcgggggaagtagggtgtcgcgcggcgtagggggcgtcgtagtcggcgtacgtatttagagcgaatagggcgagttgtttagtcgaggggattattttacgggcgggcgggtagtaggttttttagttttttgttttatttgcggtgttcgagtggcggagcggcgtcgcggtgcgggggaaaaagacgtagattaggtagggtttgttttcggcgcgggagggcggagggaggatcgagcgtttttttgttggtattcgtttcgtagcgttgttcgtcgggcggaaataggaaggcggttatcgttattttttcgttattcggcgatcggggtatagttgatttttttttttcgtttcgatgggggtgtttttttgagggtatagagggtgggggtttggggtaaggggcggggacgttgagcgtatcgagtagggcgcgggttgttgggcggggcgatttgggattttagagtttggcggcgcgagtcgggtattcgggtcgacgaaaaggtaggaagcgtttgattttagatattattttcgattgttagcgtcgtgcggtagcggattttagcgtgcggggtcggcgtcggtcgcgtagtcggattgttttgggtcgtagtggcggtttttaggttttaggcggcggagcggagtcgttcgggtattcgttatttatatcgaggggtcgtttttggggtatttttggggcggggaaggttggaggttggggacgtagttaggaaagggatttgtgagtttcgtcggtcgtttgttaagatttggtttaaggaaagtggttttttgaattaatgaagaatttgttaaattaggttttttatttgtgttatagtttttattaattttggtaacgtttgtcgttttattttttaggtaggttatatcgttaagattagttttcgtatttttggtttgggattgataaaaaatgggtttttgtgacgaatttggttatatggtattattagttgaggttaaaagtttgttagtttgttattaagtgtatttcgaaagaggggtgtgtgggttcgagttatttgggtggtttttttaggatttgtggttttgaggtggtttttggtgttggaatttggggaggtggaggggatagagggaagatattttgggcgaagagtggaagatttataggtttttcggtgatttttatggggatagtatattcgggagatttatgttttttaggtattcggagtttacggattgattttttttttttgttttttttggtttacgtgtttcgggtagatttattttttttgaaggtgggggtgggggttgttgggtttggggaattttttgttgtttatttggggaggtttaggtttttacggttgatttttgtttagtttgttttatgtaagtagagtaatttagttttaagaaggaagtattaggttattggttttaatatttgggtaggaagtattagtgtaaattattttttttaatagatttgtcggagtatattttgtttttttagggtaaattttttttttggtttattttatgtatgtataaggtatatatgtattttttttagtaggttgtttttgatttttattttttttaggttgattttgatttgttttggtggtttttttgttttttttttaaattagtttgttttggttatagaaggggaggaattaggggtttttttattttttttttgttttttaggattagagaaggatttgattttttgttttttattggaatacgtaaattaagtttattgtggttgagggatggttgtttagtcggttgagggttatgtttagtagtttttgtttatttgttttttatttttaaagttagaggtggagggaagtagtagaattaagttaattttttttatgattggaaaatattttaaattaagaggtaatttgtaggttaggtatggtggtttatatttgtaatattattattttgggaggttgaggtgggtggattgtttgagtttaggagttcgagattagtttgggtaatatggtaaaattttttatttttattaaatatataaaaaattagttagatatggtggcgtgcgtttgtagttttagttatttgggaggttgaggtacgagaattatttgaatttgggaggtagaggttgtagtgagttaagattgtgttattgtattttagtttggatgatagaataagattttgttttaaaaaaaaaaaaaaaagaaaaaaagagatggtcgggcgcggtggtttacgtttgtaattttagtattttgggaggtcgaggcgggcggattacgaggttaggagatcgagattatttcggttaaaacggtgaaatttcgtttttattaaaaatataaaaaaaattagtcgggcgtagtggcgggcgtttgtagttttagttatttgggaggttgaggtaggagaatggcgtgaattcgggaggcggagtttgtagtgagtcgagatttcgttattgtattttagtttgggcgatagagcgagatttcgttttaaaaaaaaaaaaaaaaaaaaaaaaagaaaaaaagagataatttgttattttataaattaaagagtatttaaattaaagtatattttaatgtttgaaaattattaattttttttttaagatttttaaaagttggtttatatttgtggttttataattttttaatttatttaagttaaataggttattaggggttgggtgtttttttttttttttttaatttaaagattatttttttggtaaattgaattgaaatgatttttaaacgtttagttatagaggaaatttaatattttaaattgttgatgttttattttttgtattttatatattttatttaatttttataataattttatgagatagattttatttttttttataagagaagaattaagattgagtgaatttagtaatttatttagaattatatagttaataaagggtagagtttgattttgaaagtagaataagttggttttgaggtttatgtgttggtttttttgttatattgtttcggtttttatatttttaataaggataatgtttaatttattgggttgatgtgagtattaaatgtaagaatttatttgtatatttagtataatatttgatattaataaaattatttattatttaaaggaaaatttttttagtggatatattttttttttgttttagttttttattattatttttatgttattatttttatattagtttttttgtttgagtatatgtatgtatatgtacgtgtatatttttttttatgggaaatatttttataggtgaattaggaggtatgaagttgttttttagttgtggtgtgaaagaaataagaaaaaaattgatagaacgcgatttagagtaaagtaattattttttttaaagggtggtgtgatattttgtattggaatattttattttttgagtcgagtgaaattttaattgtagttttttgaagttgtgtggagatttaggtatgcgtttttatttatagatattgtatttgtttcgcgtggttattgtagtttttgtttttttgtacgtggagtttgatgattatgtggtttttttattaagagtttgtttggattgtttttgtatatatttgttgtagttggttttgagtttagtataattttttttgtgagaagttaattatagttttttttttttgtgtaaataagagaattatgttatgttttattgagagtcggtaaatcgttttgttagttttttttttttttttttttatatgtttattatagagggtatgtttaaagagtttttttttttattgtgattagttttttttttttttttgatttatttgtggaagtgattgtggagttatgagtattagagttttttttgaataatttaggttagttgagtttgttgttttagattagtagttatttaagatattggggattgaatagtttagatattttttgggaggaagtatagttatgggtttagtattgaaggaattataatttttatagttaagttttagggagtagtaattgggttggtttaggtggttgtaggatttttttgggtgatagtagtagatagttaggtttagagggaaaataggatggggtatttggtgtagagggagggtaaaggagagatgttatttgtgtatgagaaagaaagagggaagttttattaaggattttggagaattgtgtttagggagagtgaggagattttaatgtgttaagggatttagaaaaagaaatttattgtttaaatattagttttttttggggttttagttattagtgtgttttttattttttgttaaaggaaaaagtaggaaattttatgttgggtttatttttatagtttttattattagtataatgggcgaggtaagaagagataagaggtatttgttttgtttttagttatttgcgtgattttcgttgttagtgttgtttaaagattggtttgattttttgtttaatatttgttattttttagtttttaggtttacgtttggaatgtatattgaagttgaaattgaagtttaaattttttttttttagaggagattttatagaatggttttaaagtttagtattgaagtgtggaggttggtgttttattagtggtttaagtagttttatgttttagttaaggtgttaggttagagtttttgggatttagggttattaggtggttattacgtgaaagatattatatagtttgtgaattttttagacgataggatgtagtagtagtatttataggattgagcgtagttgttgtgaagttattttattaagcgtgtttggaggtaggatagttttgtatttaattttgtttttttatttttgttattttttttagtagttttaattatatagttatatttttttggagattggaaagattgttttagtaggagtgtttttgggaaagttttaaattaagtatttagaaatatttaggtaagtatatttaatgatgttgatggaaatagggtagtgatgattaatagaagtaaaagagagataggagaaagaaaatatgaagaattaaggaaggagaaattaaagaattatagagagttgaaa

SEQ ID NO: 77 - DNA, 2205 bp, Artificial Sequence
  chemically treated genomic DNA (Homo sapiens)
ggatttttagtaggggagtaatatggatttggaaagattattttggttgttgtgtggggatagataagacggtgggagtttagaaaggaggttgggttggaaattttgggatagaaatttagagaggaaaagattgggtttggggtttttagtgagtattagggagtggggaattagtaggagtttggtttttatttatttttttttttttttttttttttttttttgtaggttggtttcggttttatttttaggtgtggttttaggatagttttggtcgttgttagtttgtaggttatggattttgttatgtgtttagtagttcgggtatttattagttggtttgttttacgtggcggtttttgggtagttggcgagaatagttggtacgggttttcgtgggtggtgggtcgtagttgttgtatggggatattatttatagtggggtcgatcgttatcgtttgtatatagttgttggtggtatcgtgtatttggagatcggtttgttgtttcgtaatttcgatcgttacggcgtggagtgttgagggattttgtttttaacgttattattatttatatttcggatatttagtgatgggggaggatggtatagtggttaagagtatagattttagagattgttagagttgattttagttaaggtatggtatcgtttttgttttttttaggatttcggggtttttttgggtttagtttttttatttgtaaattggggatagtaaatgtatggggtcgtagggtgttgagtgataggaggttgtttagttatatgggaggtgtttagtaaaggagagtaatttttataggtgtttgttttttgatttttttattttttaggtgttttgttgttttttttttttattgatatttttcggaggtttttatgttgatagatttttttttttttattttgttttttagtttgatttttttttcgttttgggttttttttttttggtcggtttttttgtgttttatttttcggattaagtttttttcgtttggttttttttttttggtgatttatatcgttcgtaaagttatagcgtatttggattattcgttttggtggcgtttggtcgttaggaggtagtattttgtttgcggggcggagtcggggagttcgtttttttttttttagggttgaagggatttttttcggagttcgtttacgcgagatgaggacggtggtttagtttttttatgttttttttttgggggtcgttttcgttttcgtttcgtgcgttttttgggtggggtcgggggcggttttaaaattttttgtcgatttagtcggttttcgtcgtcgtcgtttttcgcgttttgggttattttttttttattttttttcgcggagtagttagatagcgagggtttcggtcgggggtaggggggacgtttcgttcggggtattttttcggttttgagtcgttcgcggggtcggtttcggttcggagcggaggaaggagtcgtcgaggagtagtttgaggttttagagtttgagacgagtcgtcgtcgttttcgttattgcggggaggagggggaggaggagcgggaggagggacgagttggtcgggagaagaggaaaaaaatttttgagattttttcgttgtcgttgggagtcggaggcgcggggattttttggcgcgacgttgtttcgcgaggaggtaggatttggggattttagatcgtttttttttgtcgtcggggacgtttgttttttttttgttttttatacggcgttttttaggcgtttttatttcggattagttttcgggagtcgtcgattcggtttttcgtaaagatttttttttagatttcgggcgtattttttgtacgtcgtttttattttcggtttgttttttgagttttcgcgtattttagatttttttttttttaggagacggattttttttcgatttgttatagattttttatttaagattatttattttttggtattagatcgcgtttatttaggttattttcgtgggatattgagatattttcggtttaagttttttttttattattgcgtttttttttttgaggagttttagttttttttcgaggtttttttattttttgtcgggagatttttagtttttgtaggggcggggtttttttattatattagttttgttcgcgttttcggtagtgtcggggggcgtcgttttttttatg

SEQ ID NO: 78 - DNA, 2205 bp, Artificial Sequence
  chemically treated genomic DNA (Homo sapiens)
tatgggggaggcggcgtttttcggtattgtcgagagcgcgaatagggttggtgtggtggggaggtttcgtttttgtaggggttgggggtttttcggtaaaaggtaggagggtttcgagggaaagttgaggttttttagggagaagggcgtagtggtggaggggaggtttggatcgggggtgttttagtattttacggaaataatttagatgggcgcgatttggtattagaaggtgggtggttttgaataggggatttgtggtaggtcggagagagattcgttttttggaggagaaagggtttaggatgcgcgggggtttaggagataggtcggggatgaaggcggcgtgtagggggtgcgttcgaggtttggggaaaagtttttgcgggaggtcgggtcggcgattttcgagggttggttcggaatgggggcgtttgagggacgtcgtgtagggggtagggagggagtaagcgttttcggcggtaaagggaggcggtttggggtttttaagttttgttttttcgcggggtagcgtcgcgttaagaggttttcgcgttttcggtttttagcggtaacggaaaagttttaaaagtttttttttttttttttcgattagttcgttttttttttcgttttttttttttttttttttcgtagtggcgggggcggcggcggttcgttttagattttggggttttaggttgtttttcggcgattttttttttcgtttcgggtcgaggtcggtttcgcgggcggtttagagtcgggggggtgtttcggacggggcgttttttttgttttcggtcggggttttcgttgtttggttgtttcgcggagggaggtgggagggagatggtttagggcgcgaagggcggcggcggcggggatcggttgggtcggtagggggttttgaagtcgttttcggttttatttaggaagcgtacggggcgggagcgggggcggtttttagggggagggtatgggggggttgggttatcgtttttatttcgcgtgggcgggtttcgaggggggtttttttagttttgggggaaagggggcgggtttttcggtttcgtttcgtaaatagggtgttgttttttggcggttaagcgttattaaagcgggtgatttagatgcgttgtggttttgcgggcggtgtgggttattagagaaagaggattaggcggagaaggtttaattcgggggatgagatataggggagtcgattagaggagggggatttagaacggaaggagagttaggttgggaaataaggtaggagaaggagggtttgttaatatgggggttttcggagggtgttagtgggaggagggggtaataggatatttgagggatggaagggttaggaggtagatatttgtaagaattgtttttttttattgagtattttttatgtggttaagtagttttttgttatttaatattttgcgattttatatatttattgtttttaatttatagatagggaaattgggtttagagggatttcgaggttttagaaaggatagaagcggtgttatgttttagttggggttagttttgatagtttttagagtttgtgtttttgattattgtgttatttttttttattattgggtgttcggggtgtggatggtggtgacgttggaggtagagttttttagtattttacgtcgtagcggtcgaagttgcggagtagtaggtcgatttttaggtgtacggtgttattagtagttgtgtgtaggcgatagcggtcggttttattgtagatggtgtttttatgtagtagttgcggtttattatttacgaaagttcgtgttaattgttttcgttaattgtttaggggtcgttacgtggggtaggttagttggtgggtgttcgggttattgggtatatggtaaaatttatagtttgtaagttggtagcggttaaagttgttttgggattatatttggaaatggagtcggggttagtttgtaggaaaggagagagaggggaaaggagggatgggtggggattagatttttgttgattttttattttttgatatttattggagattttaggtttagtttttttttttttgggtttttgttttagagtttttaatttagttttttttttaggtttttatcgttttatttatttttatatagtagttaaagtgatttttttaaatttatgttatttttttgttaaggattt

SEQ ID NO: 79 - DNA, 3037 bp, Artificial Sequence
  chemically treated genomic DNA (Homo sapiens)
gaattttcgaaattttttttgtagaaaattttggaaggtgtttgttatattgattttggaatgtgtgtttatttggggttatataaatttgttttgtggaagttatttgaagttaggaagagatggagggtattttttaggagtgagatgagattttattatatttgattgtttagtattatttttgagtgaggggattaaaaaatttattttttaaattaggatatttttaagagtggaagggggatttattaatatttttatttggataagaggtaaatattagaatgttttcgatgaaggggatatataatggatttttttgatgtgaaatttgttagatgggttggaaagttcgtatattgggataagtatgatttgagttgtttgggataaggataggggtataagagaaggaaatgggtaaagagagaagtttgtatttagttaagggtgtagagatgttatatatgattgttttttagggaatcgggtttttagtttatattttagttgtttaattattttttttttgaattgattgttttttttttggaattttaggtttgattttattttttggtttttttagtttacgatttttttgattcgatttttttttttagaatttagtcgtttgaatttttagtttgtggtttttttttaggttttagttttttttgtttttgattgaaatagtagtattttttaagttttgggggttttttcgggttttagtttcgatttagaattcgttcgttgtttgttacgttgttattgtcgttttttttataaagggatttgagcgttcgggtttaggggtttcgtatagtaggtgaggtttttttgttttatttttttgggttgttcgtgtttcgtgttttggattatcgtttagtagtgttttgttttttgtttgggtttcggttttttttgtatttgttgtttggattttcggtttgtttgggtttgggttttggtgggtttggttttggtttttttttttgtttttgattttttatttgttagttttattgtttttgttatatattttttgtttttgttatggtttttttttgttttttttttgtttttttttgtttttttttgtttattttggggtttttttgattgtattttgtttttttttttgtcgatttttttttcgggggtcggggggtgttgttttttagggcgggaggtttgtttttcgtcgcgtgtttcgtttcgtttattgtttttttttttttttttttttttttgtaggttttttttatgatattatttgaacgttttttttttttaagggtgtgtggtattattttatattttttttttttggggttgttgttggttttgttgtttggggtttaggtgaggtagtaggagaatgggggttgttggggtggtttagttaaattttgagttttagagttttttttaattttgtttttttttaggggttttttggtgttggttttatatttttagttgtttagattgttcgttagtattttaagatgtattttgtttatagtaattttaaatttgttgtttattttattggtaaatatttatttgattttttagatatgtttttattagttttttttttatttttgttttaggaatttaagtatttattttttttttttaattttttttacgttaaaaaaaatagagggagtttatttttatgtttttttttgttattttttaggaatttagttgtttagtgtttatttttttagggattgagatttttgatttagatttttgattttttatttttattttttatggttttttttaggagattttagtaagtagaatttattgttttggagagtaaatacggatcgtgtttttttttaggatggtttttttttgagtaataatttttttttggtttttattagtggtatttatttcgtttatttttaggtggttttttttgggaaagtttatttttttaaggttattttttttttattttatttggtttatgaggtttagtttttttttttttagtattttttttatgtgtttttttttagtttttagaagatggtgtatttagggttgtaggaattttggttgtattcgatgtattacggggttgcgttttagtttatttagggagattagttatttatttatatagatggtattttttatttagtttttagttttagtattgttttttttggagttttcgttttgtagaatttggaaaaatttagaaagaaaaaataattgattttaagattttttttttattttgtttttattttgattattttaggggtcgttattattttttttttggttattttaatagtttaagttttttttgattaagttatcggagtttttaaagaaggaattttaggtattttaggggattatatttttttgaattatttttgatgtttgtttggttgaggattttaagtttgtttaggaatttttagtttaaagttgttggttttgtttattagttaggtggggtttagatttatatatagaggaagagtaggtatatggaggagtttgggggatgattagaggtagggaggggattatttatgaaggtaaaaaaattaaattatttatttatggaggatggagagaggggaataatagaagaatatttaaggagaaatagagataggtttaagagatgaagagtgagagggtatgcgtataaggttgattaagagagaaagaagtaggtatgagggattatagggttttagaaggtagggaaaggttttgaaagttagttgtcgattagagttttatacggaggtatttgtattttcgatgaagtttaataaattttttttttttgaaatgttgtttgtttgtgtgtgtgtgtttgggagtgagaattttttagtttatttaaggaatggagggagggatagagggtttaaagggagtaagagttgtggggagaataaaaggataagggtttagagagttttagggatatgtgatggatttattaggtgaggtcgttagattgttgtag

SEQ ID NO: 80 - DNA, 3037 bp, Artificial Sequence
  chemically treated genomic DNA (Homo sapiens)
ttgtagtagtttggcggttttatttggtgagtttattatatatttttgaagttttttgagtttttatttttttgttttttttatagtttttgttttttttgagttttttgtttttttttttattttttagatagattgggaagtttttatttttagatatatatatataagtagatagtattttagagaaaagaggtttattgggttttatcgagggtgtagatgttttcgtgtggggttttggtcggtagttggtttttagagtttttttttgttttttggggttttgtgattttttatgtttattttttttttttttggttagttttgtgcgtatgtttttttattttttattttttgggtttgtttttgtttttttttggatgtttttttattatttttttttttttattttttataaataaataatttaatttttttgtttttataaatagttttttttttgtttttagttattttttaagtttttttatgtgtttgttttttttttgtgtgtggatttaggttttatttagttggtggataagattaatagttttgggttgggaatttttaggtaggtttgaaatttttagttagatagatattagggatggtttagggaggtgtggttttttgggatgtttagaattttttttttgaaagtttcggtgatttgattagggaagatttgagttgttggaatggttaaaggagaggtggtgacgatttttgaaatggttagaatggaggtagaatggggagaaggttttgaaattaattattttttttttttggatttttttaagttttatagagcgaaggttttaaagaagatagtattagggttgaggattaggtgggggatgttatttgtgtgggtggatagttggtttttttgggtgagttggaacgtagtttcgtggtatatcgagtgtagttagggtttttgtagttttggatatattattttttgggagttgaggagaggtatatggaaggggtattgggaggagaagagttggattttatgggttaggtagagtggggaggaggtggttttgggagagtaggtttttttagagaagattatttgggagtagacgaagtagatgttattggtggggattaggagagaattgttgtttaaggagaaattattttggaggaaggtacggttcgtgtttgttttttagagtagtgagttttgtttgttggggttttttaggaagagttataggggatgggggtgggagattaggggtttggattagaggttttaatttttgaggaagtgggtattgaataattgagtttttgggggatggtagggggaggtataggagtgggttttttttgttttttttagcgtgggggaagttgggggagaggggtggatgtttgggtttttgaggtaggggtaggaggagagttggtggggatatgtttgggaggttaggtggatgtttattaatgaggtgagtagtaggtttgaggttgttgtgggtaagatgtattttggggtgttgacgggtagtttgggtagttgaaggtgtgaggttaatattagggagtttttaggggagaatagagttgaggggggttttagggtttaaggtttggttgagttattttagtagtttttatttttttgttgttttatttgggttttaggtagtagaattagtagtagttttagaaggaggaggtgtagggtggtgttatatatttttgggaggaagagacgtttaggtggtgttatggggagaatttgtagagaaagagagagagagagagagatagtgagcggggcggggtacgcggcggaagatagatttttcgttttgggagatagtatttttcgattttcgagagagagatcgatagagaaggggataagatgtagttagagaaattttaaggtgagtagagggagatagagagagataggaagggaatagagaggaattatggtagaaatagagaatgtgtgatagagataatgagattgatagatggagagttagagatagagaaggaaattaaaattaaatttattaaggtttaggtttaggtaggtcggggatttaggtagtaggtgtaggagggatcgaggtttaggtagagggtaggatattgttgggcggtagtttaaagtacgaagtacgggtagtttaaggagatggggtaggagagttttatttgttgtgcggagtttttgggttcggacgtttaggtttttttatagaggaagcggtagtggtagcgtggtaggtagcgggcgggttttaggtcggggttggggttcggggaagtttttagggtttagaagatattgttgttttagttaaaggtaggaaaggttgaggtttaggagagaattataggttgggggtttaggcgattgagttttgggaaagggagtcgggttaggggaatcgtgggttgggagggttagggagtggggttaggtttagagttttaaagaagggatagttaatttagagaggaggtggttgagtagttggggtgtgagttggaggttcggttttttgaagagtaattatatataatatttttgtatttttggttgagtataggtttttttttttgtttattttttttttttgtatttttgtttttgttttaaataatttaaattatatttgttttagtatacggattttttagtttatttggtaggttttatattaagaaggtttattatatattttttttatcggggatattttggtgtttgttttttgtttaggtgaaaatattaatggattttttttttatttttgaaagtgttttagtttggaagataaattttttggtttttttatttagagatgatgttggatagttaagtatgatgaggttttattttatttttgaaggatgttttttatttttttttgattttaggtggtttttatagaatagatttatataattttaaataaatatatattttaggattaatgtggtagatattttttaaagttttttataaaggaagtttcgagaattt

SEQ ID NO: 81 - DNA, 3107 bp, Artificial Sequence
  chemically treated genomic DNA (Homo sapiens)
ttgtagtgaacggtgattatattattgtatattagtttggggatatagttagattttgttataaaaaagtaaaaataattggttagtgtatgaggggttcgtgttttttgtttgtttgtttgttgagatagagttttattttgtcgttagattggaatgtagtggtatattttcggtttattgtaatttttgttttttaggtttaagtaattatttgttttagttttttaagtagttgggattataggcgttcgtattacgttcggttaatttttttgtatttttagtagagacggggttttattattttggttaggttggttttgaatttttgattttatgatttattcgtttcggttttttaaagtgttgggattataggcgtgagtttttcgttcggttaggggcgcgcgtttttaaaatatgggagagggaattgtgttttataattattattaggtgtttcgatatcgggtgttacgtcgtttcgtttttgaggcgcggcggtttattttggtaggtcgaggcgggtggattatttgaggttaggagttcgagattagtttgataaatatggtgaaatttcgtttttattaaaaatataaaaaattagtcggacgtggtggcgtatgtttgtaattttagttatttgggaggttgaggtaggagaatcgtttgaattcgggaggcggaggttgcgatgagtcgagatcgcgttattgtattttagtttgggaaataagagcgaaattcgttttaagaaaaaaaaggaaagattttttttttttttttcgtcggaaatatttttttttaggacggcgcgtttgtgcggcgacgcgcgtttagttatttagtaatttcggcgttaagttattttaggtggagtttagtaataatagagttatcgcgttttttattaattagcgtcgatttcgttttcgtaggtttaattaattagtgtcggcgttgtaaggaagtttttagagttttcgaggaaggtttttttaatttaaatttattcgtttgataatttttttatatttttttaaagaaggaagagaagcgtatagaggagaagggaaataattttttaggagttttttttacggttatgaggaatttggggtttagttgaaaagtttaaattgtttttcgggaggttgggcgcggcgaattatttttagcggcgtacggagacggcgtttacgtgaggggtgataagtgacgtaatattcgttgtataaatttgttttcgttagttcggagtatttaggggcggttggttttgttgggtgagtttgtttgtgtttttgtgggtggacgtggttggtgattggtaggattttggtattcgttaataggtattggttcgtagtcgtaacgattttgggggggtgtgagaggggggaatgggtgaggttaaggtggaggttttttggggttgggtgggtcgttgaggggagggcgtgggggaggggagggcgaggtgacgcggcgttgggttttttcgggatagtgggttttgttgatttgaggggggcgagggcggttggcgcgcgcgggttgacggaaattaacggacgtttaatcgatcggcgattttgtcgagtttatttcgcggggaaggcggaaaagaggtagtttgtgtggtttttggaagtttttattttggaattttagtgtgagaaaggtgtttttttttgtgttttaatgggatttttatttcgcgagttttgtgggtttggttttgtttttagtttgtttaatatcgtgtttaggtttgaggtagattggagttcggtcgggggagtttgaatattcggaatagttagtggggaaagttgtggacgtttggtaagagagcgttttggatttttcgttgttgacgttgaaattttgaatgacgaatttcgtattaagtgatttagttttgtaaaattgaggggaggtttgcggaatattaacgtatttaaggtattttgaaggaatagttgttaattttgaagaatattaggtgtaaaagtaagaaatataatgattttgaggtgatacgtttatgttttatttttaaattaggttaaaatgtagattttcgtgaaaatttttatcggtaagattattatttttgaggtggagtttagtgatattatcgaaaatgtgaaggttaagatttaggataaggaaggtatttttttcgattagtagaggtttatttttgtaggtaagtagttggaagatggtcgtattttttttgattataatatttagaaggagtcgattttgtatttggttttgcgtttgagaggtggtatgtagattttcgtgaagattttgatcggtaagattattattttggaagtggagtttagtgatattatcgaaaatgtgaaggttaagatttaggataaagaaggtatttttttcgattagtagaggtttatttttgtaggtaagtagttggaagatggtcgtattttttttgattataatatttagaaggagtcgattttgtatttggttttgcgtttgagaggtggtatgtagattttcgtgaagattttgatcggtaagattattattttggaagtggagtttagtgatattatcgaaaatgtgaaggttaagatttaagataaagaaggtatttttttcgattagtagaggtttatttttgtaggtaagtagttggaagatggtcgtattttttttgattataatatttagaaggagtcgattttgtatttggttttgcgtttgaggggtggttgttaattttttagttatggtattcgtagtgtttagtgatggtattattttgtattatagttatttgttttaatttaagtttagaaattataagttttagtaatagttgaatttgtttaaaatgttaataaaggtttcgttgtatggtagtatatttggtgttttgttatgaaattttttagtgatgtgtgggtacgtttaaaattggtgaaaatgtttagggatttaattttgagattggtaatgtgtttaaagttaagttatttgattttggtatatatttgggtgggttgaggggtaagagttttttttgttgtttaagttattataagttaggattt

SEQ ID NO: 82 - DNA, 3107 bp, Artificial Sequence
  chemically treated genomic DNA (Homo sapiens)
ggattttaatttgtaatgatttaaatagtaaagaaggtttttgttttttagtttatttaagtgtatattaaagttaagtgatttaattttgagtatattattaattttaaaattaaatttttaaatatttttattagttttaagcgtatttatatattattagagaattttatgataaaatattaagtatgttattatgtaacgaaatttttattaatattttgaataggtttagttattattgaaatttgtaatttttaaatttaagttggggtaaatggttatagtgtagagtaatgttattattgggtattgcgaatgttatgattgaagaattaatagttattttttaggcgtaggattaggtgtagggtcgattttttttggatgttgtagttagaaagagtgcggttattttttagttgtttgtttgtaaagatgagtttttgttggtcgggagggatgttttttttattttggattttggtttttatattttcgatggtgttattgggttttatttttagagtgatggttttgtcggttagggtttttacgaagatttgtatattattttttagacgtaggattaggtgtagggtcgattttttttggatgttgtagttagaaagagtgcggttattttttagttgtttgtttgtaaagatgagtttttgttggtcgggagggatgttttttttattttggattttggtttttatattttcgatggtgttattgggttttatttttagggtgatggttttgtcggttagggtttttacgaagatttgtatattattttttagacgtaggattaggtgtagggtcgattttttttggatgttgtagttagaaagagtacggttattttttagttgtttgtttgtaaagatgagtttttgttggtcggggggaatgttttttttattttggattttggtttttatattttcgatggtgttattgggttttattttaagggtgatggttttgtcggtaagggtttttacgaagatttgtattttgatttagtttaaaagtaaaatataagcgtgttattttaggattattgtattttttgtttttatatttaatattttttaaaattagtaattatttttttaaaatgttttaaatacgttaatatttcgtaagtttttttttaattttataaggttaagttatttaatacgaaattcgttatttaaggttttaacgttaatagcggaaaatttagagcgtttttttattaagcgtttatagttttttttattaattgtttcggatatttaaattttttcgatcgaattttaatttgttttaaatttaagtacggtgttaggtaaattgaaaataaaattaaatttataagattcgcgaaataaaaattttattgaaatataagaaggggtattttttttatattgggattttaaagtaaaggtttttagaaattatataaattatttttttttcgtttttttcgcgaagtaaattcgatagaatcgtcgatcggttaggcgttcgttagttttcgttaattcgcgcgcgttaatcgttttcgttttttttaggttaataaggtttattgtttcggaaaggtttagcgtcgcgttatttcgttttttttttttttacgttttttttttagcggtttatttaattttaagaagtttttattttgattttatttattttttttttttatatttttttaaggtcgttacggttgcgggttagtatttgttagcggatattaggattttgttaattattaattacgtttatttatagggatataaataagtttatttaataaagttaatcgtttttaaatgtttcgggttggcggaggtaaatttatgtaacgagtgttgcgttatttattattttttacgtagacgtcgttttcgtgcgtcgttgaaagtagttcgtcgcgtttaatttttcgagaggtagtttaggttttttaattgagttttaaattttttatagtcgtaagaaaggtttttaaaaaattatttttttttttttttatgcgttttttttttttttttaggaaaatataagaaaattattaggcggatgaatttgagttgaagaaatttttttcgaaagttttggaaatttttttgtagcgtcggtattgattggttaggtttgcgaaggcgaggtcggcgttgattggtgggggacgcggtggttttgttgttgttgggttttatttggggtggtttagcgtcgaggttgttaagtaattgagcgcgcgtcgtcgtataggcgcgtcgttttgaaagagggtattttcggcgggagaaggagggggggttttttttttttttttttgagacggatttcgtttttgttttttaggttggagtgtaatggcgcgatttcggtttatcgtaattttcgtttttcgggtttaagcgatttttttgttttagttttttaagtagttgggattataggtatgcgttattacgttcggttaattttttgtatttttagtagagacggggttttattatgtttgttaggttggtttcgaatttttgattttaggtaatttattcgtttcggtttgttaaagtgggtcgtcgcgttttagaagcgggacggcgtggtattcgatatcgagatatttgatggtgattgtgaagtataatttttttttttatgttttaaaaacgcgcgtttttggtcgggcgggaggtttacgtttgtaattttagtattttgggaggtcgaggcgggtggattatgaggttaggggtttaagattagtttggttaaggtggtgaaatttcgtttttattaaaaatataaaaaaattagtcgggcgtggtgcgggcgtttgtaattttagttatttgggaggttgaggtagataattgtttgaatttaggaggtagagattgtagtgggtcgagaatgtgttattgtattttagtttggcgatagagtgagattttgttttaataaatagataaataaaaaatacgagttttttatatattggttagttgtttttgtttttttgtgataaagtttggttgtgtttttaggttggtgtgtagtggtgtgattatcgtttattgtag

SEQ ID NO: 83 - DNA, 5969 bp, Artificial Sequence
  chemically treated genomic DNA (Homo sapiens)
ttaaggaggaaggatttataattgatttcgttgttttttattagtgttaaaatagattagtttagtgatgtttaagtggatacgatttagaagcgagacgtaaagaggttaaatacgggtaaatcgtacgtaaaattttgatattattgtaatacgttcgtggggtgggggtggtaagagtgttttagtatcgtagtttcggcgtagatcggaatttcgtagttattttggtggtttcgtggtgggaaagacgcgttttagcgaatcggtcgcgttattttcggagtacgttgggaattacggtaggttagggcgtaaagagagtagtcgggcggttttttggtgttatttgttggtttttcgtgtgtggtaagtattgtcgttttttcgttgattatttgttgggttattgtcgagaattacggttggggtgagaattgtggtttggcgttattttttagtgagggttattttggtgttcggaaagggcgttgggttattagtatattgttacgagtgggagtaggagttttgtagtcggatatcgtggattttgtttttgtttttttcgttttggttgtgtggttttttataggttatttaatttttttggggttaagttgttttatttgtgaagtggggattatagtatttatgttatgagagcgtttgaggagatgataggatgtatgagaaatgttttgttttttaaataaatgttggttttattattgttcgtttttttttgtttttttgttttttgatgttgtttttgtttgttttgtttttttgagataggattttattttgttgtttaagttggaatgtaatggtatgattatagtttattgtagttttgaatttttgggttagagcgattttttcgttttagtttttggagtagttgggattataggtatattttattttattttaaataatttttttattatttttagtagagatagggttttgttatgttgtttaggttggttttaagtttttgggtttaagtgatttttttatttgggttttttaaattgttgggattataggcgtgagttattacgatcggtttttaatttttatttattttgtttttttttaatggaacgaaagttttatgagattagaggttttgttttgatagattttaataaatgtataatattgtatgattattattataattaagatttaagatagtttcgtttttttataaaattgttttagttttttaattaatttcgtttattatttagtattagtaattattgatttgttttttttttttatagttttgttttttttagaattttatatatagggaattgtcgtggtttgaatatttgtttttttaaaattcgcgttgaaatttaatttttagtgtggtagtattgagaggtggggttttgaagaggcgattgggatatgagagttttgttataatgtttttataaatgaattaatagattaatgggtttaggggttaatgggttaatgggttatcgtgggagtgggattggtgtttttataaaaggaagaagagagatttgagttagtatattgaggtttttcgcgatgtgatgttttatacggttttaggatttaatagagtttttattagtaagagggtttttattagatgtagttttttaatttcggattttttagtttttatgagaaatgtttttgtgggattttttttatttaagtatattgtttttaagatttatttatgcgtttttttattttttcgtttttttttgtgagataaggtttggttttattgtttaagttggagtgtagttgtatgatttcggtttattgtaatttttattttttaggttttatttttattttagttttttaagtagttgggattataggtatgtattattatattcggttaatttttgtattttttgtagagatgggtttttgttatgttgtttaggttggtttttatagtttttagttggtgagttgaagaaattcgtttgttttggttttttaaagtgttggaattgtagttatgagtcgttgtgtttagtcgtatatgtatatttgtattatttatttgtttttttttattattggtatagaagggatgttttataggagtaggttttatatagggttgtttttttgattttaggttattatgagtaaaattattataaatatttatatataagttttgtgaatatagttttttattttttttgggtaaataatgtttaggtgtgggagtgttgggttatagtggttttaagggtaaatgatttttagttttgagttttttttttttagattttagttttttgttttaggtattgggatatattagtaataagaagtagtaagtttttttttttatttaggttatatttcggggatggagatagaaatatataaggaaagaataaataatatgttgtttttaaagaaattgtgtaaaaagaaaaaataaataagatgtttttgtatagtatagtagttatagagtaatgggttagaaagtggggtaggaggagaagttttttttagggaaagattttgagttgagatttgaggttttttaggtaaggggacggtgaatgtaagggtgtgtaggttatagggggataagttgggtgtgtttagtaattgtgttgggagttggatttagtagtgggggtttttattagagaggaggtagtattgagatttgggtaggaagttggggtttattttaagtttttttgaaaattaaagaagggttttaatttaaggattgtttttttttttttttttttttttttgtttgtagatagggttttgttttgttatttaggttggagtgtagtggtataattttagtttattgtaattttcgtttttcgggtttaagtgatttttttgttttagttttttgagtagttgggattgtaaatgtatgttattacgtttggttaatttttgtatttttagtagagacggggttttattatgtttgttaggttggtttcgaatttttgtgtttaagcgatacgtttttttttggttttttaaagtgttgggattataggcgtgagttatcgagttgggttaggttttaggtattgttatgatgtaaaaatttttttttagaaaagagaatattagttttttagttggttttttgtagttaggagatgtaagagtagtagttgaatttgaggtttgttttggagaaagaattaaaagtagatatggatggtttggatgtgagggagggaaagagaattttaagtgtattagtagtggtgggaggaggttcggtatagtggtgttatttggaagataaatcgttggtgtttaatttttatgattcgaaagttttttataagtttgatatattaggtaaaatgtttgattgtattaagttttagtttatcgttataaaataggttatgaaaattgcgtgagaaaatgtatataatagtttaataaataatattggttgggtgtggtggtttatgtttgtaattttagtattttgggaggttaaggtgggtagatcgtttgaggttaggagttcgagattagattggttaatatggtgagattttttatttttattaaaaaaatataaaatatatttgggtaaatatggtgaaattttatttttattaaaaatagaaaaattagttaggcgtggtggcgcgcgtttataattttagttgaggtacgagaatcgtttgaattcgggaggcggaggttgtagtgggttgagattatattattgtattttagtttgggcgatagagtaagattttgttttaaaaataaaatatatatataaaatataatagtatttgtttgtttgtttgtttttgagatgtttcggattatagtgcggggattatagacgtgagttattaagttcggataatattattatattgtttattgtatttttataatatttttaaggggtaggaatttttttttttagtttttttttttcgattttatcgagagatagggtttcgttttgtcgtttaggtttggagtgtattggcgcgattaaagtttattatagtttagattttttggttttaagcgattttttagtttgggttttttaaagcgttaggattataggcgtgggttatcgcgtttgattagttttttttttttgtagttgagttttaagagtttgtttaaagagtagaggtgggttgaaggtataaagcgaatgaaagaataggttttcgggtatcgttgtacgttttatttttttttaggggcgttgtattttagtttttttcgtatatgcgtattgggttttttatcgtttttcgtttttagtaaagtttttcgttcggagtatgcgcgggtcgtttggcgttaattgttgatcgttatagttatagttagggttagtttcgtcggttttcgggtggcgcgcgttcgttgtttttttagttttaggatgatcggttagaagacgttttattttttttttttttttagtttcgttaggaagcgatacgtttttagtttcgagtcggtcgtttaggggatcggcgtggttggggtgtttgaggaaagcggagatgcggcggtgaggcgcggtttgggtcggggttagggggtgaagggggaggaaggcggtgggtttcgtttgacggagggcgtgtaggatcgcgtttttgattcggtaaattcgggtttcgttttttaaatagtttttacgtgtttaaaatagtcgtcgttgttttttatgggtcgttatgttaaagggttagttaatgggaacgcgtttcggggtttatggcgttaattcgcgcgtcgtaggtttttttggttcggtgcgttgtttaattagaggggagagggggcgggatttagagggaggttttttgtcgcgaaaagattacgtggggacgcggtggggcgggtttggcgggggcggggtatttttgtgtagggtttttagttatcgcgacgtttttcgggaagttatagggcgttttttagttcgttttttcgttttagtttagaatttaatttttaattttcggatcgggtttagttttgggtttttattgttcgtttttgttgggatttgttttataaatgggcgttttttgttttgggtcgtgggggttgggtcggaagttgcggacgtttgggaaggggtcgttgtagtttttgagtcgtttttgcggggattatttgtaggttattttagttaagaaggtttcggttgggtaggaggagtttgggacgtcgtttttttcgtcgttgagtgtcgagtagttggatcggatttagaggaataaggtcgcggttttgtttagattcgcggttcgtaacgtgttcgtgggttttggagagagttggaagaagtattttagcggggagttcgggaaatcgtattttattaaggtaaatatggaaatgtattttttataagggtaaatgtggaggttgtcggtttttttgttttgttagtgtagtcggttaagtttatgttttcgtaggtttaggttgtattttttttaattttttttatttataaagggggtaaaagaaagttatgatgttttattttgtagttttatattggttaaagttgttaacgattcgcgagatgatattatggatttatttaagttatatagtttattgtttaggaaaggttggcgtagtaaaattattaattattttgaatgaaatttggtttgagttttaaaaagtcgagaggagtggtattgttaggatttagtttagagaaagaggtaaggaattgatttgattgaattatttaggtgggggggtaggtattgtttttgtttgttgttttttaaaagaatttggatataatatgataaagaattaatgatgttttaaataatttgtattagaagtttttttattgaatttttatggtttttaatgagaatttgattttaagtttagtttatttttaaattagt

SEQ ID NO: 84 - DNA, 5969 bp, Artificial Sequence
  chemically treated genomic DNA (Homo sapiens)
gttgatttaaagataaattagatttaaaattagatttttattggaaattataagaatttaataagaaagtttttagtgtaagttatttggaatattattagttttttgttatgttatgtttaaatttttttaaaaaataataaataaaaatagtgtttgtttttttatttaagtggtttaattaggttaattttttgtttttttttttgggttgggttttgatagtgttatttttttcggttttttaaagtttaagttaggttttatttaggatggttggtgattttattacgttagttttttttggataatagattatgtgatttaaatgaatttatgatattatttcgcgggtcgttaataattttaattaatataaagttgtagagtgaaatattatggtttttttttattttttttgtgagtaaaggaggttgaagggggtataatttaagtttacggaaatatgaatttggtcggttatattaataagataaaagggtcggtagtttttatatttatttttatggaaggtgtatttttatatttattttgataaaatacggtttttcgaatttttcgttgaggtgttttttttagttttttttaaagtttacgggtacgttgcgggtcgcgagtttgagtagggtcgcggttttgtttttttggattcggtttaattgttcggtatttagcggcgaggagggcggcgttttaggttttttttgtttagtcggggtttttttggttgggatggtttgtaagtggttttcgtagaggcggtttaagagttgtagcggtttttttttaggcgttcgtagttttcggtttaatttttacggtttaaggtagaagacgtttatttgtggaataggttttagtaaaagcggatagtaagagtttagggttgggttcggttcgggaattgggaattaggttttaaattggagcggggagacgggttgggaggcgttttatggtttttcgaggagcgtcgcggtgattgggaattttgtatagaggtgtttcgttttcgttagattcgttttatcgcgtttttacgtggttttttcgcggtaaaaaatttttttttgggtttcgtttttttttttttttgattggatagcgtatcgagttaggagggtttgcggcgcgcggattggcgttatgggtttcgagacgcgtttttattggttggttttttagtatggcggtttatgggggatagcggcggttattttgaatacgtggaggttatttggaaagcggagttcgggtttatcgagttagaggcgcgattttgtacgtttttcgttaggcggggtttatcgtttttttttttttttattttttagtttcggtttaagtcgcgttttatcgtcgtattttcgttttttttaggtattttagttacgtcggttttttggacggtcggttcggggttgggggcgtgtcgttttttggcggggttgggggagaaaaaggagtagagcgttttttggtcgattattttggagttgaggaggtagcgaacgcgcgttattcgggaatcggcgaggttagttttggttgtggttgtggcggttagtaattggcgttaagcggttcgcgtatgtttcgagcggggggttttgttgggggcggggggcggtggaaggtttagtgcgtatgtgcgggaggggttggagtgtaacgtttttgggaggaggtggggcgtgtaacggtgttcgggggtttatttttttattcgttttgtgtttttagtttatttttgttttttggataggtttttaaggtttagttgtaagaagagaagattggttaggcgcggtggtttacgtttgtaattttagcgttttgggaggtttaggttggaggatcgtttgaggttagagggtttgagttgtagtgagttttgatcgcgttaatgtattttaggtttgggcgatagagcgagattttgtttttcggtggggtcggggggagggggttgggaagaaaagtttttgttttttaggggtgttgtgggagtgtaatgaataatataataatattgttcgggtttgatggtttacgtttgtaattttcgtattgtaattcgaggtattttaaaaataaataaataaataaatattattatattttgtgtgtgtattttgtttttgagatagagttttgttttgtcgtttaggttggaatgtagtggtgtgattttagtttattgtaattttcgtttttcggatttaagcgattttcgtgttttagttaggattataggcgcgcgttattacgtttggttaatttttttatttttagtagaaatggggttttattatgtttgtttaagtgtgttttgtatttttttagtagagatgggggattttattatgttggttagtttggtttcgaatttttgattttaggcgatttgtttattttggttttttaaagtgttgggattataggtatgagttattatatttagttaatattatttgttgaattgttatatatatttttttacgtaatttttatggtttattttatgacgataaattaaggtttagtgtagttaaatattttgtttaatgtattaggtttgtgggagattttcgggttatagaggttaaatattaacgatttgttttttaaatgatattattgtatcgaatttttttttattattattaatatatttaggatttttttttttttttttatatttaaattatttatatttgtttttggttttttttttaaagtaaattttaaatttaattgttgtttttgtattttttagttatagaagattagttgggaagttggtgtttttttttttagagagagatttttatattatgataatatttggggtttggtttagttcggtggtttacgtttgtaattttaatattttgggaggttaaggaggggcgtatcgtttgagtataggagttcgagattagtttggtaaatatggtgaaatttcgtttttattaaaaatataaaaattagttaggcgtggtggtatgtatttgtaattttagttatttaggaggttgaggtaggagaattatttgaattcgggaggcggaggttgtagtgagttgagattgtgttattgtattttagtttgggtgatagagtaagattttgtttataaataaaaaaaagaaaaagaaaaaaaagataatttttaggttaaaatttttttttggtttttaaaaaggtttagaataaattttagttttttatttaggttttagtgttgttttttttttgatggaagtttttattattgagtttagtttttagtataattgttggatatatttagtttgtttttttgtggtttgtatatttttgtatttatcgtttttttgtttggaaagttttaggttttagtttaggatttttttttgaaaaggatttttttttttgttttattttttagtttattgttttataattgttatattatataaaagtattttatttattttttttttttatataatttttttagagatagtatattatttattttttttttgtgtgtttttgtttttattttcgaaatgtaatttgagtgaagaaaggaatttgttgttttttgttgttggtgtgttttagtgtttaggataagaagttgaagtttaagggagagaggtttaaagttgaaaattatttgtttttagagttattatgatttagtatttttatatttaggtattatttatttaagggaaatgaaaaattatatttataaagtttgtatgtgaatgtttatagtgattttatttatagtaatttaaaattagagaaataattttatgtggggtttatttttgtggggtattttttttatattagtaataaaaaggaataaataagtaatataaatgtgtatatacgattgggtatagcggtttatgattgtaattttagtattttgggaggttaaggtaggcggatttttttagtttattagttgaagattatggagattagtttgggtaatatggtaaaaatttatttttataaaaaatataaaaattagtcgggtgtagtggtgtatgtttgtagttttagttatttgggaggttgaggtgggagtggagtttgggaagtggaggttgtagtgagtcgagattatgtaattgtattttagtttaggtagtagagttagattttgttttataaaaaaaagcggggaggtgggggggcgtataaatgaattttaaaagtaatatgtttaagtgaaagaagttttataaaggtattttttatagaggttgagaggttcgaggttgaggggttgtatttggtgaaaatttttttgttggtggggattttgttgagttttgaagtcgtgtagggtattatatcgcgaggggttttagtgtgttagtttaggtttttttttttttttttataaagatattagttttatttttacggtaatttattaatttattaatttttgagtttattaatttattaatttatttatgaggatattatgatagagtttttatgttttaatcgtttttttaaggttttattttttaatattgttatattgaggattaaattttaacgcggattttggaggaatagatatttaaattacggtaattttttgtatatgaaattttggaaaaggtaaaattatagggagagaagatagattagtggttgttgatgttgggtgatgggcgaagttgattaagaggttggagtagttttatggagggacggaattgttttagattttgattgtggtggtgattatataatattgtatatttgttgaaatttgttaaaataaagtttttgattttatggagttttcgttttattgaggggagatagagtaaataaaaattaggagtcggtcgtggtggtttacgtttgtaattttaataatttgggaggtttaggtgggaggattatttgagtttaggagtttgagattagtttgggtaatatagtaaggttttatttttattaaaaataataaaaaaattatttagggtggggtgggatgtgtttgtagttttagttattttagaggttgagacgggaggatcgttttaatttaggagtttaaggttgtagtgagttatgattatgttattgtattttagtttgggtaatagagtgagattttgttttaaaaaaataaaataaataagaataatattaaaaaataagaaaataaagaaaaacgagtaataatggaattaatatttatttagaggatagagtattttttatgtattttgttatttttttaggcgtttttatgatataggtgttgtagtttttattttatagatgaggtaatttaattttagagaggttaagtgatttgtgggaggttatatagttagggcggaggagatagaaatagaatttacgatattcgattgtagaatttttgtttttattcgtgataatatattggtggtttaacgtttttttcggatattaaagtaatttttattgagaagtgacgttaagttatagtttttattttagtcgtgattttcgatagtggtttaataggtgattaacgggaaagcggtagtgtttgttatatacgggaggttagtaggtggtattagagggtcgttcggttgttttttttgcgttttagtttgtcgtagtttttagcgtgtttcggaagtgacgcgatcgattcgttggggcgcgttttttttattacgaggttattagggtgattgcgggatttcgatttgcgtcggagttgcgatgttagagtatttttgttatttttattttacggacgtgttgtagtgatattagaattttgcgtgcggtttattcgtgtttaatttttttgcgtttcgtttttgaatcgtatttatttgagtattattagattgatttattttaatattggtggggggtagcgaggttagttatgggttttttttttttaa

SEQ ID NO: 85 - DNA, 8111 bp, Artificial Sequence
  chemically treated genomic DNA (Homo sapiens)
aaatgggtatgttttggggttagatttggaggaatagtagagattggagtgttagaaggtgagtatgtttgggggtgttggggagatgtaatttattagggatagtttagtgttaggggattagattggggtttatgaaggagaggtagaggttgatgggtttaggggtggtgtgggtaggtgagtttttttagatagtgattttgttttgttttttttttagttaggtttttttttttatttttttttttttttttgattggatttttttgggagagttattttttttggttttttttgttttaatttttttattagttggttattattatttattattattttaagttaaatttttagatttatatggggttaggatattggtattggattaaagaggtttttttttttgttttttttttgtttttttaatgttttgttgtaaagatttaggcggggagagagagagagagagagagatagagattgatttatagttagggttagggaattgaggggaattaatttaatttttttttttttaatttattaggtttgtattttgttttttttgtagattagtgttttgttagttatttgggggttaggggatggagtgaaggataagatttttttttattgtagtgaagttatttggagaaatgtgtggaaaatagtaagatttagtgattttttttttattttttttttaattttaggagagattttgtttttttatttatcggtttttagattaattatttatatttatataggcgagagtttttttgaatattggaggtgataggatattaggataaagtataattattgtgttttggtttaattattattttttttgtttggggtcgtcgttggtttttggttgtttttcgtatttttttttatttttattttttttttttttttttttttatttggaatatttttttttttttttttggttttttttgaattgtttttagagttatagattgtggggagtggttattgcgtttttaaggtgaggttttttaagcggggtcgagtttgttttttaattgggagttagtatgatttttgtgtgggttgttttttgttttattgtttttttttttaatttgttaggtgattttgggtttttttgtgttttttttgggttttcggaggattttttggggagatagtttgttttgacgtttttttttttgtagtaagtagtttggggagggaggtgaggataagtgaagttaagttgtttagggggttaagtttatggaagggaagatgttatagagatatatgtggttttgtgattgttgttttgtgttttttttttttttttgaaagtttaggtgattaggtgatttgagtttttaatttggtgataatgtgggtattggttgagtttttaagagtatattgttgtaaatgtcggtgataatatattggggtatgggatttagagttaatttttttaggttatagttaggttatatttttataatgaaggggggaggtgggttatattttttcgttttaatgaaggtagtttaaaaatttttaggttaggttgtaattttagttttatataaaaggaattttgtgtttttatttttttggatttttgggtaaagttttagagggaaatataaataggttgttgtaatatattttgttgggtattattatggaggatagttggtttatgggggtggggggtgtttggggttacggagtgattggtgatggttatttttttttggaatttttttagtttttttttagttttagatttgtttatttgttttttattaagatttgtttttttaggtttgttggtttttttaggggttgaagaaggtcgagttgagaagggatgtaagggagggggttagaatgagtttttagggtttagagtttttattttgttttaagatgtttatagtttgtgtttttggggtgttagaggcgtataaggaggaaagttagtggttttttttttatatttcgtttattagtttagagtatggagtttaggtgaggaggtttgtttgggagggggttttgagttaggaaataaatatttattaattgtataaagattttgtttttgttgttggggagtttgttaagtggtggagataggattagtgtacgaatgatggaaagggagggttggggtgggtgggagttagtttttttttttataagggttttaggatattatatcgatggaattgggggtattggggaggtaatttagtatttttattaaattatagtaatatgtgttgaggatggggttgattaggtaagttttttggagcgttttggttaaattgagggaaattgttgtatttttatttttagtttatgtttttatagaggttatgttagttgtaggttagattttggtaagatttgggtggataattagattgattggttttattttttttataggttttagagttttaattttgttttttggggtagtttggaaatagttaggttagaaattagttaggaatttttttaagttgttttttatatgtaagaatgggatgggggtttttgggagtatttagggaagatgtggagagttggaggaaaagggggtttggaggtaagggaggggattgggggaaggataggggagaagttgtgagtttggagaagtagttaagggattttgagggaatgggggagttgagacgaaatttttatttttatttagaagatgagttatgagtttgggtttgggttgatagaagttttggtttttggtttggtgggagttttgggtagttggtttatagacgttttttagtgttggcgggtaggtttgaattattacgtaggttttggtttttattcgtttttattagttttttggttttagttttttggtaatatttggggttgggggggtagtaggaataagggtttttgtttgtttagttgtttttttttttgggttttgttagattttatagtgtatacgtgggttttaataggttttttttttttttagttattgattaatttcggaattatatagtttttcgtttttagttttataaatttggtgttaaattttttttttttgggaagtatttttggatattttttaaaggattttagttattttagtttgttggttgtcgtttattttgatgtttgtaggttagatgagggttttagatggtatattgttagagggatatattgtggtttttgtgtttagttttgggttttttgtatatgaagtaattttagttttaaatatgtagttgtttgggaggttagaaatagggggtttaggagtaaattttttttattttttttttaaagtttattttttttttagttagagtcggggtgtgtagacggtagttattagggggcgttcggttattatagggaagttgggtgaatggagcgagtagcgttttcgagagtgaggacgtgtgtgtttgtgtgggtgagtgagtgtgtgcgtgtggggttgagggcgttggagcggggagaaggttaggggttattttaggattttaatagatttgtgtgtttttttttttattcgtttttgttcggtttttcgtttttttttgttttttttaatatttttagtaaagagggaacggtttttaggttttgttcgtacgtaattttatttttttgtttttttttcgttaatgtttcgcgggcgcgtgtttttggatagagttttcgggggcggatgggtaatttttaggttgtgaattttggtgggggtcgagttttttttttattgcggcgggttgcgggttaggttttattgagcgttcgtagagttcgggttcgagtcgcgtgtggaagggttgaggttcgtttgttttcgtttttcggggcgggtcgggggcggggtttcggcggggcggagttatgcgttttttttttttttttttaaaagtcggttggtagcggggaggatcgcggaggtttggggtagtcgggtagttcggaggtcgtggcgttgggggttagtattagcgttttgtcgggaggcgtagcggttaggtggatcggttagcggatttatcggttagggcgttcggtgttggaatttgatatttattgattcgggttttattttttttttttttttttaaatatttttttttaaaattgtattgtttttcgttttaatttatttttgtttgttattttttatttgaatcgggtcgacggtttggggagattgttttatttttttaaattattgtggattttggaaattagtagaaagaggaaagaggtagtaagagttttagagagaagtcgaggaagagagagacggggttagagagagcgcgcgggcgtgcgagtagcgaaagcgataggggtaaagtgagtgatttgtttttgggggtgatcgtcggagcgcggcgtgagtttttttttttgggatttcgtagttgattagtcgcgttgacggatagatagatagatatcgtttttagttttagttattatttttttttcggtcggcggcggatagtggacgcggcggcgagtcgcgggtaggggtcggagttcgcgttcggaggcggggtggagggggtcggggttcgcggcgtcgtattgaaatttttcgtttaatttttgggttgttttcgtttcggaggagtcgtggttcgcgcgggggaagtcgagtcgagcggagtcgcgagaagtgttagttcgggtcgggaggagtcgtagtcggaggagggggaggaggaagaagagaaggaagaggagagggggtcgtagtggcgattcggcgttcggaagtcgggtttatggacgggtgaggcggcggtgtgcgtagatagtgttttagtcgcgcgcgttttttaggttttggttcgggtttcgggtcggggaggaagagtagttcgtcgaggcgtcgaggagagcgggtcgttttatagttcgagtcggagagggagcgcgagtcgcgtcggtttcggtcgggttttcgaaattatgaattttttgttgttttgggtgtattggagttttgttttgttgttttatttttattatgttaaggtaagcggtcgtgttttgttggcgtcgcgggtcgttgcgagcgtttttttcggttggggacgtgcgtgcgagcgcgcgcgtgggggtttcgtgttttacgcgggtttatgggtattaggcgtgcggcgtttttttttgtcgttttaggtgtagggggagggggcgcgcgcgttaggtgggagggtattcggagagaggtttatcgtttacgcgggttttgtttatttatcggagttatcgtacgtacgatttgggtcgattagtcgagggcgggagtcggaggaggaggtcgagggggttgggtttgcgttgtcgttgtcggttgaagtttgttttcggtcgttggtttcggacgaattggaagtttgagtagcgggggcgggagttagagattagtgggtagggggtgttcggattttggatcgcgggagggtagagagcgtggagggggtagggcgtaggagggagagggggtttgttgttattgttattcggtttttttagttttcgtcgcgagtttgggaaaagttttggggtggattgttgcggggattttttttttttgttgggttatttgcgtcgcgttaatttcgttcgttttcgttcgcgtttcgttcggtgttcgttttttttcgttcggtcgggtgcgcgcggcgcggagtcgattatattagttcgggtttggtcggtcgcgtgttttcggagtttcggttgttcgaatggggagtttagagtggcgagcggtattttttttttcgttagtttttcgcgggaaggtgatttttcgaggtagttttagttcggggatttagagaattatttttatttttttttattgtttttagattttatttttgtttagtgttaggaggaattttttgacgttttttttttttatttattttttttttagtttggagagaagtttttgttatttcgtttatttttatttttttttgcggagaagatttatttaatttttttttggttttagagtttagggaaaggatgattattgttagaagtcgtggcgcgggagtttattgggcgttttgttatattttatcgaaagtttcgatttggtgatagtgtgttttttttttttcgttaatagtttcgagtgagttgtgttttagttttcgtgggggtgggttaagggaggatttgaagagttattgttttattttatttttttggagaaatggtttgaaatttgttgtgatacgggtagtatgggaatagttttttttgaattttggaaaggagtttttgttagttttgtatatattttgttttggtgaaaggtagttttggagtaggtgtttttttggaattttaaatttgtttatttaatttgtttttgaaagggattttaaagggttttttttcgtttttttttgacgtttttttttagttagaatttttttggagaggaggtaagaggaaagttatggataggggtcgttgttaatatcgtaagttttttagattttggtataaaggttttggttataggtttttaagtagggaggagggggaggagtggttgtttggttatagtgtgatttttagaggtttttagagaaggatatttggtttttgtttgtttagaatcgttttttttgtgttttttggttttggaaggggtatgaaattttcgtttttttttttttttggggtttaggaggagtggagggtttcgggagaatattgttagggggaaggtagggggtgttatgggaatgggtgagggggttgaggtgtagaatttagggggtttttgtaggagtcgtagtggtaagttgtttagttggaagtttggtaattgttgtttttttttgagaggggttttttgtgattttggttgtttttgggagtagggttggggtatttgagtggggtgtatttggggtgtgtgggaaggagagggaaagaaagatggatagtgggatttttttttagtagggtttggtgtttcgtaggttagagtgtttttttgttttgcgagtgttgggcgggaggggagttggtgagagttggagatttttaggaagggttggtagaagtttttttttttgggtgttgttaggttcgtatgttttggcgtgttgatttttatagtttttggcgaggggaggaatgatttgatgcgggtggggagggttagaggaggttttaggtttaaggtggtgtagggggttttttaggggttgggtagtgttaaggtataaaagttttttttggtttttggtggtatttgaaggtgtttaggtgagaggggtttggtatttttttattttgggagggagaagaaattagggaataggtaggagtgggagataggtgaggttttggaaatttattgaggttttggagagatttgtgtagagaggaaaatgtggtttttttttagggtttttttttgggtttttattttttaagtaatttgtgggtatgttgggttatttttaaggattagaagagtttggatgggggagggtggttggtgtttttcggttttcggtattttttttcgtttttaatattagtttattttggtatttgttatgttagtaggagaaggttattatgttgtttttttcgtttttagttttttttttttgttttagtttaaatttgtttttttatttgattttaatatttattatggttttggattagggaattagggggatagtgagagtagggagagggaagtgtggggaaggtataggggatttcgatagtgaagtattttggggttttttttttgtatttcgagttttttagtttttaatatttggttagtttttaattttttcgggtttataattatagtagtttaggagtggtgggtatattttgtgttcgtggggattttcggttgtgttttgttcgatttagaagatttggagaagttagaggttgttggtgggagggaagtgaggagggaggaggggttgggtggttgggtttgtgtattttagtttttgtttatgtttatgttttgttttttttttgtttttagt

SEQ ID NO: 86 - DNA, 8111 bp, Artificial Sequence
  chemically treated genomic DNA (Homo sapiens)
attgaggatagaaagagagtaaggtatgggtatgggtaggggttggggtgtataggtttagttatttagttttttttttttttttattttttttttattaatagtttttggtttttttaagttttttgagtcgaataggatataatcgggggtttttacgggtatagaatatgtttattatttttggattgttatggttatgaattcgaggaagttaaagattaattagatgttgggggttggggagttcgaaatgtaggaggaaaattttagaatgttttattgtcgaggttttttgtattttttttatatttttttttttttgtttttattatttttttagttttttggtttaaagttatggtaagtattaaggttaaataggaggataaatttggattggggtaggaaggaaggattaggggcgagaaaaataatatggtgatttttttttgttgatatgataaatattagggtgagttggtgttggagacggaggggggtgtcgaggatcgaagggtattaattatttttttttatttaagtttttttagtttttaggaataatttagtatgtttataggttgtttagagggtaaaaatttaggaggagattttgggggagaattatatttttttttttatataaatttttttagagttttaatagatttttaaagttttatttgttttttatttttatttgttttttggtttttttttttttttagggtgaggaggtgttaagttttttttatttgggtatttttaaatgttattagggattagggaaggtttttatgttttggtattgtttagtttttagggggttttttgtattattttaggtttgaggttttttttaattttttttattcgtattagattattttttttttcgttagaagttgtgaaggttaatacgttaagatatgcggatttgatagtatttaaaaggaaaggtttttgttagttttttttgggggtttttagtttttattaatttttttttcgtttagtattcgtagagtagaggggtattttagtttacggaatattagattttgttaggggagagttttattgtttattttttttttttttttttttttatatattttaaatgtattttatttaggtattttagttttgtttttagagatagttaaggttataggaagttttttttaagagaaaataatagttattaggtttttagttggatagtttattattgcggtttttgtagggattttttggattttgtattttagtttttttatttatttttatgatattttttgttttttttttgataatattttttcgggattttttattttttttgggttttaaggaggaaaggggacggaaattttatattttttttaaggttagggggtataggaggggcggttttaggtaggtaggggttaggtgtttttttttgggggtttttgaaggttatattgtggttaggtagttattttttttttttttttttatttggaggtttgtagttaaggtttttgtgttagggtttgaggaatttgcggtgttagtagcgatttttgtttatggttttttttttgttttttttttaagggaattttggttgagggaaggcgttagagaggagcggaaagggattttttagagttttttttagaagtaagttgggtgggtaggtttggagttttaaaaaaatatttgttttagggttgttttttattaggataaagtgtgtgtaaggttggtaggagtttttttttagggtttaggaaggattatttttatgttgttcgtgttatagtaaattttaagttatttttttaaaagggtaaagtggggtaatgattttttaaatttttttttgatttatttttacgagagttaaagtatagtttattcggaattgttggcgagggaagggaagtatattgttattaagtcgggattttcggtggaatgtgataaagcgtttagtgggttttcgcgttacgatttttgatagtgattattttttttttggattttggggttagaaaggggttagatggatttttttcgtagagagaaatgaaaataagcggggtgataggggtttttttttaggttaaaaaggaaatgggtgaagagaaggggcgttaggaaattttttttagtattgggtagaggtagggtttggagatagtaggaaggggtagggatggttttttggattttcgggttggggttatttcgagaggttattttttcgcggagggttggcggggggaggggtgtcgttcgttattttgggttttttattcgggtagtcgaggtttcgggaatacgcggtcggttaggttcgggttgatgtaatcggtttcgcgtcgcgcgtattcggtcgggcgggggagggcgggtatcgagcgggacgcgagcggggacgggcggggttggcgcggcgtaggtggtttagtagggagggggggttttcgtagtaatttattttaaaattttttttaaattcgcggcgagggttgaagagatcgagtggtagtgatagtaagtttttttttttttttgcgttttgttttttttacgttttttgttttttcgcggtttaaggttcgagtattttttgtttattggtttttggttttcgttttcgttgtttagatttttagttcgttcgggattagcggtcgggagtaaattttagtcggtagcggtaacgtaagtttagttttttcggttttttttttcggttttcgttttcggttggtcggtttagatcgtacgtgcggtgatttcggtgggtgggtagggttcgcgtgggcggtgagttttttttcgggtatttttttatttagcgcgcgcgttttttttttttgtatttaagacgatagagggggacgtcgtacgtttggtgtttatggattcgcgtggggtacggagtttttacgcgcgcgttcgtacgtacgtttttagtcgggagaggcgttcgtagcggttcgcggcgttagtagggtacgatcgtttattttggtatggtggaggtagagtagtaaggtaaggttttaatgtatttaagatagtagaaagtttatggtttcggaggttcgatcggggtcggcgcggttcgcgtttttttttcggttcgggttgtggggcggttcgtttttttcggcgtttcggcgagttatttttttttttcggttcgaggttcgggttagggtttggggagcgcgcgcggttggagtattgtttgcgtatatcgtcgttttattcgtttatgagttcggttttcgagcgtcgagtcgttattgcggttttttttttttttttttttttttttttttttttttttttttcggttgcggtttttttcggttcgagttagtatttttcgcggtttcgttcggttcggtttttttcgcgcggattacggttttttcgaagcgagaatagtttagaagttggacgaaaagttttagtgcgacgtcgcgagtttcgattttttttatttcgttttcgggcgcgggtttcggtttttgttcgcggttcgtcgtcgcgtttattgttcgtcgtcggtcggggaggaggtggtagttggggttgggggcggtgtttgtttgtttgttcgttagcgcgattggttagttgcgggattttaagggggagggtttacgtcgcgtttcggcggttatttttaaaagtaggttatttattttgtttttgtcgttttcgttgttcgtacgttcgcgcgttttttttgatttcgtttttttttttttcgatttttttttggagtttttgttattttttttttttttttgttggtttttaaaatttatagtgatttggggaagtagagtaatttttttaagtcgtcggttcgatttaagtggggaatggtaagtaaaaataaattaaaacgagaaataatatagttttaaaaaaaaatgtttaagaaaaaagaagagggataaaattcggattaatgaatattaaattttagtatcgagcgttttggtcggtgagttcgttgatcggtttatttaatcgttgcgtttttcgatagagcgttggtgttagtttttagcgttacgattttcgagttattcggttgttttaagttttcgcgatttttttcgttattagtcgatttttaaaaaaaaaaggggggggcgtatggtttcgtttcgtcgggatttcgttttcggttcgtttcggggggcggggataggcgagttttagtttttttatacgcggttcgggttcgggttttgcggacgtttagtgaagtttggttcgtagttcgtcgtaatgaaggggaagttcgatttttattaaggtttatagtttgaaaattatttattcgttttcggaaattttgtttagagatacgcgttcgcggggtattggcgaggagggagtaggaaagtgaggttacgtgcggatagggtttgagagtcgttttttttttgttaggaatattgaagggggtaggggaaggcggagagtcggatagggacgggtggggagagggatatatagatttattggaattttggagtgatttttggtttttttttcgttttaacgtttttaattttatacgtatatatttatttatttatatagatatatacgtttttattttcgaagacgttgttcgttttatttatttagtttttttgtggtggtcgagcgttttttagtgattgtcgtttgtatatttcggttttggttaaagagggaatgggttttggaaagggggtggggggagtttgtttttggattttttatttttgattttttaaatagttatatatttgggattggagttgttttatgtatagagagtttagggttgggtataggggttatagtgtgtttttttgataatgtgttatttggagtttttatttggtttgtagatattaaagtgagcggtagttaataggttggagtgattggggttttttgggaagtgtttagggatgttttttaggggagaagaatttggtattaagtttgtggagttgagaacgggaagttgtgtggtttcggggttagttagtgattgggagggaagaggatttgttggagtttacgtatgtattgtggagtttggtaaaatttaaagggggaggtagttgggtagatagaggtttttgtttttgttgtttttttaattttagatgttgttagggaattgaggttagggggttggtgggggcgggtggaggttagggtttgcgtgatgatttaaatttattcgttagtattaaggaacgtttgtaggttagttgtttagagtttttattaggttaggggttaaggtttttattagtttaagtttagatttatagtttattttttgaatagaaatgggggtttcgttttagtttttttatttttttaggattttttggttatttttttaggtttatagttttttttttattttttttttagtttttttttttatttttaagttttttttttttttaattttttatattttttttaagtgtttttaaaggtttttattttatttttgtatataggaagtagtttggaaaaatttttggttggtttttgatttggttatttttaggttgttttagggaataaagttggggttttgaggtttgtgggaagagtgggattagttagtttgattatttatttagattttgttagggtttggtttatagttggtatagtttttgtggaggtatggattgagaatgggaatgtagtaattttttttaatttaattaaaacgttttagggagtttatttagttagttttatttttagtatatgttgttgtggtttggtggaggtgttaggttatttttttagtatttttagttttatcggtatggtgttttaaggtttttatgaggaaaagggttggtttttatttattttaattttttttttttattattcgtgtattagttttgtttttattatttggtaggttttttagtagtagggataaggtttttgtatagttagtaaatgtttattttttggtttagggtttttttttaggtaggtttttttatttgggttttatgttttaggttgatgaacgggatatggaagggaagttattaatttttttttttgtgcgtttttagtattttaggagtataagttgtagatattttggggtaggatggaggttttgagttttaagggtttattttggtttttttttttgtatttttttttaattcggttttttttagtttttaaaagagttaatagatttgaaagagtaggttttagtaaaaaataaataaataaatttgaagttaagaggaggttggaggggttttaaggagggatagttattattagttatttcgtggttttaggtattttttatttttataagttaattgttttttatggtggtatttagtaaggtgtgttataataatttgtttgtgtttttttttggggttttgtttagggatttaggggagtgagggtatagaattttttttatataaggttaggattataatttggtttaggggtttttgagttatttttattagggcgagaaagtatggtttattttttttttttattgtggagatataatttggttgtgatttggaggggttaattttggattttatgttttagtgtgttgttatcggtatttataataatgtatttttaaggatttagttagtgtttatattgttattaaattaaaagtttaagttatttagttatttgagtttttaaaaaaggggaaaaagtataaaataataattataagattatatgtatttttgtggtatttttttttttatgggtttagttttttgaataatttgattttatttatttttatttttttttttaggttgtttgttgtaggggaaggggcgttagagtagattgtttttttaaagaatttttcgaaggtttagagagggtataaaggggtttagggttatttagtagattgggggaaggggtagtgaagtagagagtagtttatatagaggttatgttggtttttagttgaggggtaaattcggtttcgtttggagggttttattttgggagcgtagtggttattttttatagtttgtggttttgaaggtagtttagaaggagttaaggaggaaggggaaggtgttttaggtgagggggaaggggagaaaggggtgggggtggagaaaagtgcgaaaggtagttaggagttagcggcggttttagataaagaaagtagtgattgggttaaggtataatagttgtattttgttttgatgttttgttatttttaatatttagggaaattttcgtttgtgtgggtgtgggtggttaatttagaagtcggtggatgaagggataaaattttttttgagattggaaagaaggtgaggagagagttattgggttttgttgttttttatatatttttttaagtggttttattgtaatggaaggaggttttgttttttattttattttttgatttttaggtgattagtaggatattgatttgtaggaagggtaggatataaatttggtgaattgaaggagagagaattgggttggttttttttaattttttgattttgattgtgggttaatttttgttttttttttttttttttttttttcgtttaggtttttgtaataaagtattaaaaagataaagagaaagtaaaggaaagggtttttttggtttagtgttaatgttttagttttatgtggatttggaggtttgatttgaggtaatgataagtaatgatggttaattgataaaaagattggagtagaggaagttaaggagggtaatttttttaagaggatttagttaggaaagggggaaggaatggggaagaggatttagttggagagagggtagggtagagttattgtttggggaagtttatttatttatattatttttaggtttattagtttttgttttttttttatgggttttagtttaattttttgatattaagttgtttttgatgaattgtatttttttaatatttttaggtatgtttattttttgatattttaatttttgttatttttttaagtttgattttaaaatatgtttattt

SEQ ID NO: 87 - DNA, 11523 bp, Artificial Sequence
  chemically treated genomic DNA (Homo sapiens)
attgtttaagacggaaagattttaagattgtgtgattttttttttttttttttttttttttttttttttataggtgtagaataattttttttttttttttcgtggttttttttttttttattttttttttttgttgtttgtaaagttgaatttggggttaggagttttaattgtaattttagattggaattttagatggtgcgtttaggattggaagtaatttttagtttattaattttatgggtttacgtatttgttttggttacggtttggtttttatttttattgtggtattaatgtagaataaattgagatatattttttatataattagttttagaatttaaaaagatttacggtataataatagaggtagtgtcgcggaatttttttattgaggattttcggggagttcggggattatttcgcggtggtattagaatagacgagtaattttagcggttttaggtattgcgaattgggggagagggggaaattttgtatcgtattcggtagtatttaacggtttcgggtttttagatagggttagcgaggagagttaggatagtaagtggggattggttaaaaaaaatcgatttaattttgaaatgattagaagaagttgggagtagttattataaagttttttttttgtttttttttttttttaattgaaggaatgacgttgaaatttttatcgttagcgcggggttgggaattattttaaatatttgttttgtagtttcgagtgggtagatttcgaagagttggagtcggcggggaggggaggaatagttgttgggttgttttgcgcgtggggttcggggcgcgggtttcggggagaggcgttagtcgaaagtttgtttttttttcgcgataggtagtagcgaggtcgagttattttttattacggtttgcgggtttcgcgcgtagtgtggttgttttcgtttttgatcgatcgtagcgttttggggtgtttatttagttgttcgcggtcgttgggtgattttcggagggcggtttaggcgtgcgtattggtttttggggttgcggttgtagtagtttagtttcgcgttttgttagatgtagtggatagcgtcggggtgaaagtaagggttgagaaatttttattgttttgtttttatttagtttcgatttttttatattgtaataattatgtattttcgaggtcgggatgtttgcgttttgttagtgtattaacgttatatggttttttaggggttgttttcgtttttgtattttattagttttgaagaggtagaggggtggtgggtaaaatttttaattggacgttgagagattcgggttttagttcggcgttgttattaatttgttttttgtttttaaatagtagtagtaataaaaattgtaaagttgattgagttaaaggtttatattgtttttttatttaatttttagaataattttatgaggtgggcgttagtattttattatttcgtttgattagtaaggaaattgaggtttagagagattgcggaattcgtttagggttatatagttgttggttatttggtagagttgaggttttattttggggttattaattttttgttttttatcgttgcgttttatagattgtttttttttcggttgtttgggttttagtttttttttttgtaaaacgagaagtttaatttgtagttttttttgttaatcggtggtttagattaggaatttttgttatagatttcggcgttgataggggtaagaaggtgggtgaaagaagggggcgtttagttttttatagtttgtttttttttgggatttcgcgaagggcgggtttcgcgagttaaaggaggtataggagagcgtttatcgttcgcggcgggtgaaggtgttatttgttttcgtgttaggttgtgagttttggtgtttagtttagggcgttaaggttagtgtagttggtatgttttttttggaaaattttaggtttttcgtagagaacgttatttataataaagaagaggatagagaggtatggagcgttttgcgattgtaggagtacgttagttttttagcgttggtttagtgtcgtttgggttttcgggtatgtggattcgttggggtcgtacggagattttttgtcgggtttttggggtttttcgattgcggttttttagtttagtattttttttttggtttcgtaggttgtagggaattttttttatttttttagtcggagaagtttaagtcgggcgagggggtatttcggggttcgtatcggtgtttttttttttttcgtttttataaggattttgagaaaataaatggtagaggagagaggagttttatatttgtttggtttttttttttttttatttatttttatattttttatttcggggtaaaaatttatttttgaaaaatgttggtagagatttacgtgtttttgttttatttgggttttataaatataacgatttatatttaagttagtttttttttagataatttttttttttttcgttaaaagtgttaaggatggtaaaagaagaaataattttaattttttcgtttggaaatgaaagttttcggttttttataaagggtttttcgttttttatagttgagttttagttaagaaaaacgatttttaagtagaaataataggcggggagaaggaagggagatatagggatttggggggtttttagggtaattggtagtgaattttgtttcgagagttttttttttatttaaaaaattaaacgcgcgagtttcgcgaaaggtttagggatagatcgtgtgggagaggattgagtagagagcgtgggggtagtgttttgtagaatttttttttttttaataataattttaaaagtttttgagtggagacgacgtaaagttaagtagtaaaggtggtttgggaggtaagcggagggtttaagtgtcgtatttttatttttagggttttttgcgtttacgggatgcgtatttttaagaagtgcgtttttcgagtaagttttgggttcgtatatatttcgggttcgtagttagaatttaatggcgataacgtttatgtaatgtaagttaaaaattaaagcgtaaaaaattattatgttatttattgaaacgttattttttgttaaattgtaattattttgttttatataagtttggttggaaagtttgtagttttagttcgggttagttaggtataggaggtcggattgtaatcggttgtttttttttcgtcgcgtttggtcgttttacgttgcgtcgtcgttgttgttttttggcgtttttgggattttatacgtatttttgaaatacgtttcgtttcggttttcggtttttttttttgtttaggggttgttttttaatagatattgatttttttagaagatttaaaaattaaattaaaatattttttattcgttttaaatatttgttttggggcgcgggggttgttaaatagagattagacgaagggagttagatttagcgaagtttttcgagtttttaaagattcgaatattaattcgcgttcgtgggtcgatggaggttttttttattttattttttggtttttttaattggttttcgttttttggttaattattgagtaattagaatggtattttcgattagggttataggtagtgttcggcggagtggttttaggagttattcgttttttgtcgggtttcgtatttaaatttttttttttattttttttttttaaattgggcgttaggatgtttcggtcggaatatacgtaggttttgggcgtttgtttaagggttttttttttttttaaattagtcgttgttttttcggtttaatcgtagaagaattagatattttttattggaaagggaaattaagtgttgttgattttaattttaggtaggcggtaatcgtttttcgtttggcgtaaattttattaagtaaataattattagtcgatcgaaatacgttcggtttataattggtgtaattttcggttatttaattgagggacgttcgtttttagtttcgatttttggaatttataaagggttatttttttttttagtgattttaagattatggttatttttttattcgatagttttagaagtaagagttagatttaagggtgtaaagtaagggtatacgtttttttgaagtttgattgagttttttttgcgtttttttgaagttttcgtttttttggagtttatttgtttttttttttaaattatttttttagattaataattttatttttatttttatcgtattcgattttgttcggatttattgtttatttgaacggattttttagtgagacgaggtttttatattggcgaaggttaagaaggggaggtggggggagggttgtgttatatcggttagttgagagcgcgtgttgggttgaagaggagggtgttttcgagagggacgttttttcggattcgtttttattttagttgcgagggcgtttttaaggagtagcgcgcgttgtttggtcgggtttgggttgttgagtgaatggagcggtcgagttttttggttttttttttttttcgcgtcgtcggttttttttatttgagttttgggaagttgagggtagttaggtagttggggtaaggagtttaaggtagcgtttatattcgggggtttttcgtaattcgatcgtttgttcgtttttttatttttcgtttttttttttatttatttatttatttatttatttatttagagtcgggacggtagtttaggcgttcgggtttcgtcgttttttcgtcgcgattttggatttttttttgttgtaggattcggtttttacgtgtgtttcggagtcggcgttttagtatacgtttcgtttcgggtttgggtgtttatagtagttagagtagtagggagttcgggattcgggcggtatttgggttaagttaggcgtcgtcgaggttagcgttgaacgtttttagggtcggaggagtcgcggggcgttcgggtttgagtcgtagtaaatgggtttcgacgtgcgggatttgaacgcgttgttgttcgtcgttttttttttgggtggcggcggcggttgtgttttgtttgtgagcggcgcggcgtagtgggcgtcggtgttggattttgcgttttcgggcgtttcggtttacgggtcgttgggcggtttcgcgtcgttatcggtttcgtcgttattttcgtcgtcgtcgttttatttttttattaaataggagtcgagttggggcggcgcggagtcgtacgaggagtagtgtttgagcgtttttattgtttattttttcggttagtttattggtatagtcggagtttgtcgttacgggtttttcggttttttttcgtttagttaggcgttattcggttaggttaggatgttttttaacgcgttttatttgtttagttgtttcgagagttagttcgttattcgtaattagggtaagtaggtcggggagcgttttttacgcgcggggtagtggcgttagggatttttcgttttaggatattttttttttttattttttttgatcgtagtttttatttagttgttttttaagggtcgtgaggatagcggaagcggcggttggggaggaggtcggagagtgggagtgtacgtaggtattggttttcgatattttttaaagttaggtagagttaggagtttgattgttcgtaagagtcgggagggcgtttggggttttttagagttcgagagatttcgggattgttagtttttacgggagtggaattaggagatcggcgtagtgtttggttttgttttggggagagttttgttaattaaggaaacgttaaattgttattaagcgtagcgttttttagacgtttggattttggattcggagtgggattagcgcgggggtgagcgtttgtgttgtgttgttttcgtagcgttaaaatgtttaggagtatttttagtttttataatacggtgttggtatatatttaggtgtatattaagtatcgtagagaattagaatgagtatatgtatttttagtaattaaatggttttttggaatagcgtcgtgttcgtggatagttttcgcgtatggtaatatagaagtggatttttattgggtttcgtttaggcggcggttacgtaggttttggggatggaagagaatttgatttattcgagtttaagttatgcgggattaggttttatcgtaggtagtggaaggaggtacgagttttggttttttttttagcgtatttggggcgtttttttattttgtaaacgcggggtttagttgggatagtatttttttaagatttggggttagaataaggatagggttattcgttgtgtttagttaggatataaggagggaattcggtatacgataagtattaggttggttttttatttcgcgtcgatgttcgtttatttttttttcgtttgggcggcgcggattcgaatttgcggagtttttgtagtttgttttttttatttatttttagtggatttttacgttattgagaatttaagttagttcggtttgattcggtaatttagtaaacgttttattaatataatggcggatgttttttttggagtaaaattattcgagggtttagggatcgggatgtttttggaatgcgtgggaagtagagtgtattttttgtaggaggtattttcgtttaaggttcgggagaagggttttgtttttgttgttcgtttttattcgcgttttttaaacgcgcgtttttaggtcgtttttattttagtttaattaggagtattcggttttcgcgaagttttggagaaatcgaaatcgttttttttttcgggagaatttgggattattgttttgtggaggaatcgtaagtagatttaagggttgtttttattttatgtttttagttagtgaaattagtgttttgtatttaaggggcgttgggataatttattggtcgttgaggtttgtgttttttgattagatcgcgttatttttgtttagtaggttggtgttatttttggggagtttttaggttttagtgttttcgtttataagaggatagttgagatgggtaatttggagattgggttcggtttgaagttatattttatagatgtagaagcgttatttattatttttttggggttttaaatatggaattcggtaatttatttaaatatttgtgattgagaaataatgaattcgagagtattgtttgtatgtgtgttatttggaggcggttgagaaattatcgaatttatgtttttggggtataaaatattattacgttattatttttttagtatttttaggggatttttgaaatttgggttttgtcgtttcgtttgggttttttgtttagttttttttagggtaggtttggtgtttgggattttattatatgtcgtggggggtgggattgtgggttttgtagttagtaggtattatatttttggaaaatatttggatttttttgtaatatataggcgtggttgttatggagaaaaagttaaaaggggattaggattagtaggtgaatgtattttttttttttattttggagaaaaagtttaatggagagagggttttagatttaagttatatagtttggaagtattatttttaggtttaagttttgttttgtagtgaaaatagatgggtttattttatttagtttttgaggtttattgggtagtttggatgtgagaagcgtttcggttgttattttggagtgggtaagggtggttttcgagattttgggtttattttttggatttttagggtttttgttgtttttttaggaatgtagggtttggtttaagatttgggttgtgagaggtaagggtattaatttttaaaaatgtggaaatggttattagagcgttaaggttaaattttaggggagaggaattaaggtcgtttttggatttttagggtagtttagttatggtgtataggtaggggtaattgttggtatttatttataatcgtttaaaattttataagtatgtttatattttaaatttttaaatattatattttgtattttaattttgtaaatattaatttagtaaatattaatcgtttatttggttaggtattgggttttgaatattaattaagataatggtttcgagaatttttgtaagaagtttattagttaattttggagaggttttttgttttggatgaggaaatttaggttttatgagattaggtggtagaggtgggatttgaatttagattatgttagggtgtttttattttttttttagggattttggttttatcgttgagatggattttttttggtttgcgggaggggtattaaatttttagtttatgtgtgggggttgacgggtttgtgagggtagatgtggggtgaggatttgagtagttttagattagatgtaaggtttaaggaggaggggaaaaaagtttgtttgggtcggacgcggtggttcgaggcggttggattatttgaggttaggagtttgagattagtttggttaatacggtgaaattttgtttttattgaaaatataaaaaaaaaaattggtcgggtttggtgacgggcgtttataattttagttattcgggaggttgaggtataagaatcgtttgaattcgggaggttgaggttgaagtgagttgagatcgcgttattgtattgtagtttgggcgatagagcgaaatttcgtttcggaaaaaaaaaaaaaaaaaagaggttgtttgttagtttattgatttcgtagtttcgtaggttcgtagaattttaaggtatgattaggtttgggattattaggttattttagggttaggtgcggaggtttgcgacgttcgagggttaaaggttttttttttcggttatataggagagggtattttgttgggggataggttttttttaattatagtgtagttgtagttatcgtttttagttttttgagtatttttttggttgagtttgttgtttattttattttttagtttttacggttcggttaggttaggcggttttcggtttttttgtagtcgtcggcgggggaggagggtatagagcgcgtttcgttttttagcgtacggttaaggttgcgtttttttttcgggtcgggattaatcgtgggaaaggcgttattttggttattcgattttttttttttaaggtttgtataaggagtttttgaatacgttgttttttttagtcggtagttttattttttttggtttttgttttcgtatttttcgcgttaggttaagcgttgggtttagggatagcgcgttttaattaaattcgtgttcgataagtttttaattaaaagagattttttttcgtttcgtaggcgtttttattattgtttttttcggggggatttgaaggagagggtttgaggtcggtttttgttcgtcgaggtttgcgtgttcggtttgggaggaggtttaggagggttcgcgggttacgggtatttttgggttcgagttttggggtgcggacggacgtttcgagagtgggtgtcgcgattcgggatttacggttttcgtcgggtacggatagttgcggagtagggttttgaggattgtgtagtgttttgggtttttgtttatttttgggtttaggaatggagaagggttcgtttagagaaaattttttcgtagtttttatttcgtttttttttttttttttttttttttttttttttttttttttttttttttttttttttttgtgtttgtttttttttttttttttttttttttagtgtttttttagaaattcggtttttatttcgggtaatagtgggtgttttgagttaaatttcgtttgtaagtttatttataggttttaaagaaggttaggttttaggttttaaaaggaagtttgtggaagtttaaacgtgttcgtttatgtaggagagttaacggggtcgggggttatttttgtttatttagtaggagagaaatggaggttttcgaggttatatgataaaagttagtggttttttaaatttttagtgtgtggtgttgagtagtgtgtgagatttaagtttggatttgtattattcgggagttaggatttgtttttttttttttttttttgtattttgttatattattttttaggtttatgtttttgttgttttagagaagttttttttttttttttttttttttttttttttttgggcggggggtggtggtgtgtgtgtatgagcgttcgtgtgtgtttcgaaaatggaggtaacgatgttttgggttttgtttatcggttgagttttgtttaagtttttggaggtattttggttaaatagtgtaagagtgggagaatgggtgttgtttgatttaatttatttttgagaattttgtgaagtttggagatttagggtagttttgggttaggaggatttgaggttgttggggtggttttgttaggattttataggagtagttttttttagttattgtgtttggattttaggttatagatttcggaatttgtagaggaatgagattttatttttgggtttcggggttaatgacgtatttttagtcgaaggatttttttttttagaggtagtaatagttttttagaagtttgtggggtataagtttaaagtaatttaataataaaaattataaaagattatgttttttaattgaggttttacgtttttttttttattttgggggggggggggaatgttaggatttttttagggggaaattgaggtaaaggatcgaagtattattatggagggaaagggagatatagtgttaggtatattttaaaggaaattggttgtttagtttggggagtgaggaagttggtttttatagtagtggttagggtcggatttttgggcgtaaggtgggttttataggggggaggaggaggagagcgtagggtcgttatttgaaggtttaattggaaggggtttttgtttttttttttattagtttttttttgggtgttatggtgttaggtcgggtagttttagatagataatattattcggtaattattttttttatttttaagattaggttatttaattggtttcgagtaattaatgaaagttggtgcgcgggtttttgatttatagttcggagttaacgcggggttagtttagtagatttatttcgtttgttcgcgttgtttttgcggaagagttgtagtttatttttggggggtgaataattttttttgtcgattaggtaacgagttttatatttaatttgttaggggttcgttgtagaagcggtagagatcgtagaagattgcggtataaataaattgggaaaaagcgaggtgggggttttagttagaaaaggatggagaagtttgttttaaggttatatttagggatttgggtcgtttttttgtcgaaagttttggaggtttgtggggttggattttttttcgttgggggttcgaatgcggggtttagcgtatatttttttcgttcgtggttggtttagatttattgtttcgttttgcgagagtatcgttgatattgtgttttttttcgtcgttttcgtagg

SEQ ID NO: 88 - DNA, 11523 bp, Artificial Sequence
  chemically treated genomic DNA (Homo sapiens)
tttgcgggagcggcggagagaagtatagtgttagcggtgttttcgtaagacggggtagtgggtttgaattagttacgggcggggggggtgtgcgttgaatttcgtattcggatttttagcggaggagaatttagttttataagtttttaggattttcggtaggaagacggtttaagtttttggatgtgattttgggataggtttttttatttttttttgattaaaatttttatttcgtttttttttaatttatttatgtcgtagttttttacggtttttgtcgtttttgtagcgaatttttggtaaattaagtataaaattcgttgtttgatcgatagagaaggttgtttattttttaaaaataaattgtagttttttcgtaggagtagcgcgggtaagcgaaatgaatttgttgggttaatttcgcgttgatttcgagttgtaaattaggggttcgcgtattaatttttattaattattcggagttagttaaatggtttggttttaaaaatgggaagagtaattatcgagtaatgttatttgtttggggttattcgatttgatattatgatatttaagggaaagttggtgagggggaaaataagggttttttttagttgggtttttagatggcgattttgcgttttttttttttttttttttatgggatttattttgcgtttaggggttcgattttgattattgttgtaggagttaatttttttattttttaggttggataattaattttttttagagtgtgtttgatattgtatttttttttttttttatggtagtgtttcggttttttgttttagtttttttttagggaaattttagtatttttttttttttttaaagtgagaaaaagagcgtggagttttagttggaaaatatagttttttataatttttgttattaaattgttttaaatttatattttataagtttttggaaagttgttgttgtttttggggaaaaggatttttcggttaaagatacgttattggtttcggaatttaaggatggggttttatttttttataagtttcggagtttgtggtttgaagtttagatataatggttaaggagagttgtttttatgggattttggtagggttattttagtagttttagatttttttggtttaggattgttttgggtttttaaattttataaaatttttaggagtaaattgggttaaatagtatttatttttttatttttgtattatttgattaaagtgtttttaaagatttaagtaggatttagtcgatgagtaggatttagggtatcgttatttttattttcgaaatatatacggacgtttatgtatatatattattatttttcgtttagaaaaaaaaaaaaagaaaaagaaaaaaaaaaagtttttttggggtaatagaggtatgagtttggagggtggtgtggtagagtgtaagggagggaaggagggggtaaattttaattttcggatagtataggtttaggtttaagttttatatattgtttagtattatatattggggatttgagaagttattagtttttattatatgatttcgagggtttttattttttttttgttaagtgggtaaagataattttcggtttcgttagtttttttgtatgggcgagtacgtttgggtttttatagatttttttttgaaatttgaggtttggttttttttgaggtttatagatgagtttataaacgaaatttggtttagggtatttattattgttcggagtgaaggtcgaatttttgaaaggatattaaaaagagagagagagaaagagagatagatatagagagagagagagagagggagggagagagagagagagagagagagagagagagagagacgaaatagaagttacgaagaagttttttttagacgaatttttttttatttttgagtttaggagtaggtagggatttagggtattgtataatttttagagttttgtttcgtaattgttcgtgttcggcgagggtcgtgggtttcgagtcgcggtatttattttcgagacgttcgttcgtattttagaattcgggtttaaggatgttcgtggttcgcgagtttttttaggtttttttttagatcggatacgtagatttcggcgggtaaagatcggttttaaatttttttttttaggttttttcgggaggggtagtggtgaaagcgtttgcggagcggagggaggttttttttaattagaagtttatcggatacgggtttgattagagcgcgttgtttttgggtttagcgtttggtttggcgcggagagtgcgggggtaggggttaggggaggtaaagttgtcggttggaaggagtagcgtgtttaaaggttttttgtataggttttggagggagagaatcgagtggttaaggtagcgttttttttacggttagtttcggttcgggaggggagcgtaattttgatcgtgcgttaagaggcgagacgcgttttgtgtttttttttttcgtcggcggttgtagagaagtcgggaatcgtttggtttggtcgggtcgtgagagttgaggggtgaaatggatagtaggtttagttaggaaggtgtttagaaggttgaaaacgatgattgtagttgtattgtgattggggaaaatttgttttttaataaaatatttttttttgtgtgatcggaagagggagtttttggttttcgggcgtcgtaggttttcgtatttgattttagggtggtttgatgattttaggtttaattatgttttagggttttgcgagtttgcggggttgcgggattagtggattagtaggtaatttttttttttttttttttttttcgagacggagtttcgttttgtcgtttaggttgtagtgtagtggcgcgattttagtttattttaattttagtttttcgggtttaaacgatttttgtgttttagtttttcgagtagttgggattataggcgttcgttattaagttcggttaatttttttttttgtatttttagtagagatagggttttatcgtgttggttaggttggttttaaatttttgattttaggtgatttaatcgtttcgagttatcgcgttcggtttaagtaagtttttttttttttttttttaagttttgtatttagtttggggttatttaagtttttattttatatttgtttttataaattcgttaatttttatatatggattaagagtttggtgtttttttcgtaggttagaagaaatttattttaacggtggggttaagatttttggaaaaggagtagaaatattttagtatggtttgggtttaaattttatttttgttatttaattttatagaatttggatttttttatttaaaataaggggtttttttaggattagttggtgagttttttgtaaaggttttcgaggttattgttttaattaatatttagaatttagtgtttgattaagtaggcgattgatgtttgttaaattaatgtttataagattaggatgtaagatataatatttaagaatttaaaatatgaatatgtttgtgaagttttgggcggttgtgagtgggtattaataattgtttttgtttgtgtattatggttagattgttttagggatttagagacggttttgattttttttttttggggtttggttttggcgttttgatggttatttttatatttttgagagttgatgtttttgttttttatagtttaagttttgggttaggttttgtatttttggggaagtagtaggaattttggaaatttaaagaataaatttagaatttcgagggttatttttgtttattttaggatagtagtcggagcgttttttatatttaagttgtttaatgagttttaagggttgggtaagatggatttatttgtttttattgtaagataaaatttaaatttggagatggtgtttttaggttatatgatttgaatttagggttttttttttattgggttttttttttagggtggagaagaaggatatatttatttattagttttggtttttttttaattttttttttatggtagttacgtttgtatattatagaagaatttagatattttttagaagtgtaatgtttgttggttgtaaaatttatagttttattttttacgatatgtgataagattttaggtattagatttgttttgaaaagggttggataagggatttaaacgaagcgatagaatttaggttttaaaaattttttagaagtattaaaaagataatggcgtagtagtattttgtgttttaggggtatggattcgatggttttttaatcgtttttaaatagtatatatgtagatagtgttttcggatttattgttttttagttatagatgtttagatgggttgtcgagttttatatttaaagttttaagagggtggtgggtagcgtttttgtatttatggagtataattttaagtcggatttaatttttaggttgtttattttagttgtttttttatagacggggatattgagatttagaaattttttaaaagtaatattagtttgttaaataaaggtggcgcgatttgattaaagaatataagttttagcgattagtaagttgttttaacgttttttgagtataaaatattaattttattaattaaaagtatagagtggaggtaatttttgggtttgtttgcggtttttttataggatagtgattttagattttttcgaagaaaagggcggtttcgatttttttaaggtttcgcgggggtcgggtgtttttggttaggttaaggtaggagcggtttgaagacgcgcgtttagaaggcgcgggtgaaggcgggtaataagggtagagtttttttttcgagttttgggcgaaggtattttttgtaaaagatatattttgttttttacgtattttaaaaatatttcggtttttaggttttcgagtaattttgttttaggaaaagtattcgttattgtattagtaaagcgtttattaaattatcgaattaaatcgaattggtttaggtttttaatagcgtggaaatttattgaaaataaatgaagagggtaaattataggggtttcgtaggttcgggttcgcgtcgtttaggcgaaagagaggtgggcgggtatcggcgcgggatgagaaattaatttgatatttatcgtgtgtcgagttttttttttgtattttgattaagtatagcgaataattttgtttttgttttaattttaggttttgaagaaatattgttttagttgagtttcgcgtttataagatgaagaggcgttttagatgcgttgaaagaaaggttaaagttcgtgtttttttttattgtttgcggtagaatttggtttcgtatagtttggattcggataagttaagtttttttttatttttagaatttgcgtggtcgtcgtttgagcgaagtttagtgaagatttatttttgtattattatacgcgggagttatttacggatacgacgttgttttagaaagttatttagttattggaggtgtatgtgtttattttagttttttacgatatttaatgtgtatttaagtgtgtgttaatatcgtattataagggttggaggtgtttttggatattttagcgttgcggaggtagtatagtataggcgtttattttcgcgttggttttatttcgaatttagagtttagacgtttgaaaagcgttacgtttggtgataatttggcgtttttttaattaataaaattttttttaaggtagagttagatattgcgtcggttttttggttttattttcgtggggattagtagtttcggaatttttcggattttaaggggttttagacgttttttcggtttttgcgaatagttaggtttttagttttgtttggttttggaggatgtcgggggttagtgtttgcgtgtatttttatttttcggttttttttttagtcgtcgttttcgttatttttacggtttttgggaagtagttgggtaagagttgcggttaaaaggggtaggagaggggggtgttttagagcggagagtttttggcgttattgtttcgcgcgtagggggcgtttttcggtttatttattttgattgcgaatagcgggttggttttcgaggtagttgggtaggtagggcgcgttaggaaatattttggtttggtcggatgacgtttggttgggcggaggaggatcgaagggttcgtagcgataggtttcggttgtgttagtgaattggtcggaaaagtggatagtgaaggcgtttaggtattgtttttcgtgcggtttcgcgtcgttttagttcggtttttgtttgatgaaggagtgaggcggcggcggcgggggtggcggcggagtcggtggcggcgcggggtcgtttaacgattcgtaagtcgaagcgttcgggggcgtaaagtttagtatcggcgtttattgcgtcgcgtcgtttataggtagggtatagtcgtcgtcgttatttagggaggggacggcgggtagtagcgcgtttaggtttcgtacgtcggagtttatttgttgcggtttagattcggacgtttcgcggttttttcggttttggagacgtttagcgttggtttcggcggcgtttaatttggtttagatgtcgttcgggtttcggattttttgttgttttggttgttgtaggtatttaggttcggagcggagcgtgtgttgagacgtcggtttcgggatatacgtggaagtcgggttttgtagtaagaggaagtttaggatcgcggcgaggagacggcggggttcgggcgtttgggttgtcgtttcggttttgggtgggtgggtgggtgaatgagtaggtgggagggagggcgggaagtgggggagcggataggcggtcgggttgcggagagttttcgggtgtgggcgttgttttgaattttttattttagttgtttggttgtttttagttttttaaagtttaaataagaggggtcggcggcgcggggaagaggaggagttaggaggttcggtcgttttatttatttagtagtttaagttcggttaggtagcgcgcgttgttttttgggggcgttttcgtagttggggtgagggcgggttcgagggagcgtttttttcggagatatttttttttttaatttaatacgcgtttttagttggtcggtgtggtataattttttttttattttttttttttggttttcgttagtgtgggagtttcgttttattggagagttcgtttaggtaagtagtgagttcgggtagggtcgaatgcggtgggagtagagatggggttgttaatttaaaagagtggtttggagggaggggtaggtaggttttaagagggcgggaattttaggaaagcgtagaaagaatttagttaagttttaaagaagcgtatatttttgttttgtatttttgagtttggtttttgtttttagaattgtcgggtaggggagtggttatgattttggggttattggggaaagaggtggttttttgtgggttttagaggtcgggattgaaagcgaacgttttttagttgggtggtcgggagttgtattagttataagtcgggcgtatttcgatcggttagtagttgtttatttggtgaggtttgcgttaggcggaaggcggttgtcgtttatttaaaattggagttagtagtatttagtttttttttttagtgaggaatatttaatttttttacggttaagtcgggaaaatagcggttagtttaggagggaagaaaatttttgggtaaacgtttaaagtttgcgtatatttcggtcggagtattttggcgtttagtttggggaggaggggtgaaggggagggtttggatacgaagttcggtagggagcgggtaatttttggagttatttcgtcgagtattgtttgtggttttggtcgaggatattattttggttgtttagtgattgattaggaggcggaagttagttaaggggattaaggagtggagtagggagaatttttatcggtttacgggcgcgagttagtgttcgaatttttgggagttcgaagagtttcgttaaatttgatttttttcgtttagtttttgtttggtagttttcgcgttttagagtaggtgtttggggcgggtagggggtgttttggtttggtttttggattttttaaaggagttagtatttattgggaaataatttttaggtaaggagaagaatcgggggtcggagcggagcgtgttttagaggtgcgtataaaattttaggggcgttaggaggtagtagcgacggcgtagcgtgggacggttaggcgcgacgggagggaagtaatcggttgtagttcggttttttgtatttggttggttcgggttggggttgtaagttttttagttaaatttatgtgaagtaaagtagttgtagtttgataaagaatggcgttttaataaatgatatagtaattttttacgttttggtttttagtttgtattgtataaacgttgtcgttattaaattttggttgcggattcgaagtgtgtgcgggtttaggatttattcgaagggcgtattttttgggaatgcgtatttcgtaggcgtaggagattttgagggtaaagatgcggtatttgagtttttcgtttgttttttaggttatttttgttgtttgattttgcgtcgtttttatttagaagtttttaaaattattattaagaaaagaaagattttataagatattgtttttacgttttttgtttagtttttttttatacgatttatttttaaatttttcgcggggttcgcgcgtttggttttttgagtggagaaaggattttcgagataaaatttattgttagttgttttaagaattttttagatttttgtatttttttttttttttttcgtttattatttttatttggaagtcgttttttttaattaggatttaattgtgaggggcgaggagttttttatgaaaagtcggggatttttatttttaaacgaaaagattgagattgtttttttttttattatttttggtatttttagcggggggagaggaggttatttgaagggaggttggtttgaatgtgagtcgttgtgtttgtgaaatttaggtaaggtaaagatacgtaaatttttgttaatattttttaaaaataagtttttgtttcggggtgagggatgtaggggtggataggaggaaaggagagttaagtaaatgtagaattttttttttttttgttatttatttttttagaatttttgtgggggcggggaggggaagagtatcggtgcgaatttcggggtgttttttcgttcgatttggattttttcgattaaagaggtgggaggagttttttgtagtttgcggggttaagaagaaagtgttaagttgaggagtcgtagtcggaggattttagggattcgataggaagttttcgtacgattttaacggatttatatgttcggaagtttaggcgatattaagttagcgttggggaattgacgtatttttgtagtcgtagggcgttttatgtttttttgtttttttttttgttgtgggtaacgttttttgcgggagatttgaggttttttaagggggatatgttagttatattggttttggcgttttgagttaagtattaggatttatagtttagtacgaaggtaggtagtatttttattcgtcgcggacgataggcgtttttttgtattttttttagttcgcgaggttcgtttttcgcgaggttttagagaaaagtaggttgtggaaaattgggcgttttttttttttatttatttttttatttttgttagcgtcgagatttgtagtagaggtttttggtttgaattatcgattggtaaagaaagttgtagattaaatttttcgttttatagagaaggaaattgaggtttagatagtcgaaggagaggtagtttatggagcgtagcggtaaagagtaaggggttggtggttttagaatggaattttagttttgttaggtaattaatagttgtgtgattttagacgagtttcgtagtttttttgagttttagtttttttattggttaaacgggataatgggatattagcgtttattttatagagttgttttgaggattagataggagagtagtgtgggtttttgatttaattaattttatagtttttgttattattattgtttaaggataggaaataagttagtggtaacgtcgagttgaaattcgggttttttaacgtttagttggaggttttatttattatttttttatttttttagagttaatgggatgtagaggcgaggatagtttttggaaaattatgtggcgttgatatattggtaaagcgtaggtatttcggtttcgaaggtgtataattattgtaatatgaaaaaatcgaggttgggtaggagtagggtagtgaggattttttaatttttatttttatttcggcgttgtttattgtatttgatagagcgcggagttgggttgttatagtcgtaattttagggattagtgcgtacgtttgggtcgtttttcgggagttatttagcggtcgcggataattgaataaatattttaaagcgttgcggtcggttaagggcggggatagttatattgcgcgcggggttcgtaggtcgtaataaagagtggttcgatttcgttgttgtttgtcgcgggagaggaataagttttcgattagcgttttttttcggggttcgcgtttcgagttttacgcgtaagatagtttaatagttgtttttttttttttcgtcgattttaatttttcggaatttgtttattcggggttgtagggtaagtgtttaggatggtttttagtttcgcgttggcggtgaaaattttaacgttatttttttaattaaaaaaaggggggggtaagggaggggttttgtgataattatttttagttttttttgattattttaaaattaagtcgattttttttaattagtttttatttattgttttaatttttttcgttgattttatttgggagttcggaatcgttaggtattgtcgaatgcggtgtaaaattttttttttttttttagttcgtagtgtttggagtcgttggggttattcgtttgttttgatgttatcgcgagatggttttcgagtttttcgagagtttttagtgaaaggatttcgcggtattgtttttattattatatcgtaaatttttttaaattttggaattaattatatagaggatatgttttaatttgttttgtattaatgttatagtggggatggaggttaggtcgtggttagagtagatacgtaggtttatgaaattgatgaattgagagttgtttttagttttgagcgtattatttggaattttagtttgaggttataattagaatttttgattttagatttaattttgtaaataataggggaaaaaaatggggaaaagaaaaattacgagagagggaaaaaaaattattttgtatttgtaaaaaaaaaaaaaaaaaaaaaaaaaaaaaaaaagttatataattttaaaattttttcgttttagataat

SEQ ID NO: 89 - DNA, 6500 bp, Artificial Sequence
  chemically treated genomic DNA (Homo sapiens)
tgggtttgagttttttttttttttttggaaattttaatgtcgagaatagatttttattttttttgttttttgaatgtttttttttttttgtggtagtgatatagaacgtttagttgattatgaggaaagggttatgaggtaaaagaacgtatatggaagaaaatttttatttattaaaatagtaaaatattgttttttagtagtatagatgataaaaaatagtttttgataatatttgttgtttattgattttaataatagaaataaagtatgtttttaaaaatgattgataggatatgtgaaatataaaatattagtttaaaatgtgtttagaaaatggatttagttagttttaggtgagtaacggttttatttatagaggttgttcgtgggtaaaattggaagatgttagtttggaaggtgtgtggttatggtcggaaggtattattatgtaagtataaatattagtttcgttgtgttgtatgatatttaatgtgtttgttggattttttaataaagtaaagagaggtgttaagattggaagtgggaaaagaaaggttttgaatttgtttgggaagtgtacggggttcgtttgtgtttattaggggtgtgttacgggggttttttaggtttttttgtttttagtaattaagaggttaatttgaattagtttttttcggaagtagagtgttttttaggagaagtttttttgttttttttatgatttaagggtttttttgtttttttaaattattttttttaaataataaggcgttaaatttttttaataaaattttttgttttacgaatatttataaaacgtaaaaagtataagtttcggtggaggtaatatattgaaagttattttgttggaagtataattagaatttttttttgggtttttgtttttgttaggttgcgttggaattgtttgtaggtattatagttatgtttgtttttggtatgtaagtttttttatatagtttgggtaatatagtaaaattaggagattatagtaaaatttgtaaattaaaaaatatatatattcgggtatgatggtatgtgtttgtagttttagttatttaggaggttgaagtaggaggattttttgtgtttaggagtgtatggttttagtgatttgtgattgtgttatcgtgttttagttagggtgataaagtaagatgttgtttttaaaataaataaataaataaatgtatatataaatattttgatttttttcgtttaatgttgaaatttattatgtgaataaatattagtagtgtgttttaatttttaatattttaaatgtatatttgtatataggtattatgttattattattattagtatattttttattgtttttttttattttttgttatttttattttttagtaatttttattttttatttttagtttggtaagagattaagtttataagagtttttattaaaattttaaaaggttaattttttattttgtttttatttttatatggttttgtttttattagtatttaagattttatttacgattgaaagtagagtttttttttattttttagatgttttgtttatttttttgttggaagaaagttattaagtattgggttgggcgggtggatatatgttttgtcgagcgttatttttttttttgtttgtgtaagtgatattaggattttgtgattataggtagtttatgttttcgagggtatgtaaggttttttttttttgagaaagttcgtggaagtagaggatagtgtatgagtttttatggaaaattttttgttaaggattttagttatgattttttttatagaataggataattggagagtagttaaggagaaatatattttttatttagaaaatatttaaaattttgattggtaaaattaagtgtaataaagatgatattattttttgaatttatatattaattaatatttaatttagtttaaatgtttatttaaaattttttggtgatgtttaaataattgaataatttgatagtaaaaataaatttagatatataagtagataaaattttattttttaagtgattgtagaattatatattagtttatttttaaaaaatgaagattaaataaatatgttatagtgtggatattttataaattaaagttattatgagaatttaatatatgataaattagatttagtaatataagataaataatggagagaagaaaatatttatttaagaattagtattgggatatttaagtatgatatggagaaaagtgaaattagatttatatttttatataatataaaacgtagtgttagatattttaaaaatagttatttaaagtagaagaaaaaaattgatatatgtattagagtaaatagattgttatatttataaaagagatatatttatattagaatatgaaatagattattattatattatagatttgtttataatattaatagaatgatataataaatattaaaaggaaaataataaaatgaaaaatatttaatatatatttattgttttaaatatataaagaattgttgttaatataaatattttgtttttattttagtagtagttaaggaagattaaaagtttatataaaagggaaattttgttaaattgttaaattaaattgaattatatggaatatatatagttttatagtaattaagtaaatataaattaaaatttataaataatttataaataattaattttttatttttttaaagttagtgttggagaagagtgtgagagaaagtttatttatataattggtgggttggtatttttgaagagtaatttgttaatatgtagtaaaagttataaaattttaaaaattttaaatttatttattttatttgggaaatatatgagaagaaaaaatttagaggagaaaatgaagtttgtgtaagttttaatgtagtagtattagtttttttttttttttttttttttttttttttttttttttttttttttttttttttttttttttttttttttgagttagagtttttttttgttgtttaggttgaagtgtagtggagtgattttagattattatgatttttgtttttcgggggtttcgtgtttgagttttttgagttgttgggattttaggtatgagttattacgttaggttaatttttgtatttttagtagagatggggttttgttatgttggttaggttggtttcgaatttttgatttatgtaatttgttagttttagttttttaaaggtgtgagttattatattcggtttattttttattataaaaataagatataattttaatgtataattaaaaggaaaatggaggtataaaagtaagtgttttatattataggatgggatatagtatattattataattaaaaaggtttattgtgtggattatgttgatttatggaaattagtaagtgaagttttgataaagtggagtaagtgacgaatatattgaattgtaaggtttttggagatgggttacgtttatttatatttaatttatagggttatatttagtttttggtatatagtatatgtttagtaagagtttgttgaatgaatatatatatggtttatttgtttgtttttttcgagtttttgatttttgtttgttttgatttttggtagttttttattagtttttagtttttattttgtttatttggatttcggaattttagtttgttttatttttagataaacgtatgttttttgtggttttggaattttagtgatttttgttatattaaagtttttacgtttagggtgatacgtagttgtagtttcgtaaatttttaatatgatgttagtaaatattaaaaaaaaaaagtttataaaataatgaataaattttgttaaaggtataaatgaaaattagtaaatatgggaagataattgagtgaagagtttaaagttaaaaacgaattgtagttattttaggggaaggaatagttgtatttgaaaatttgtatggttatatgaattgtttaaaaaataagttaaggaaaattaaagtttagatttatatattttaagaaattaattgtaattaattttttgggattaaatagtatttttttaattttagttgttattaaaaagaggtaaatatagttaaggattggattttcggaaggttgatagtattgatttttaagaaggtatcggttgatagatagaatattttgttttaatatgtgttgaaatttcgttgagagtagagtggtatattgaattttttaggggtttataaaagaagtgttttgtgttttagagttatagagttttgtagaaataagtatgaatttatttagtggttttttgtattaggttttttttgtgggtattgagtgttagatatattaatatgtaatagtagaatgaatgattgaacgaacgattgaatgaaaagaaatgagaggtagtaggttgttagattttatgaggtaattatagtattaggtgattttagtatttatttgagaggattgttatttattttcgggagcgtacggttttaaagaggtttatatttaggtagtgagttttggtggggggcgtttttagatgtaagaaggaggaaatagttcgaaatttttgggtttgagcgcggttcgtgtaggtcggagggttaagaattttttatcggcggtagcggttcggtgtttgtttcggtttcgtttcggtttaaggttgtttgtgttataaatacgcggtttatatgtcgcggtgatacggtgttttttgggttcggcgggatagataatatgaatgtgttttttaaacgttttaagttgtagggatagttttcggtttagtttcgttttcggaagcgttttcgttttcgatgttttttgtagttgggaggagggggcgtttcgtatttgtttagttaatgcgcggcgcgagcgtcggtcgcgattcgttttttttcgcgagagttcggcggggatataagggggagttgcgggttaggcggcggttttttagcgtcgcgtagggtcggggattgcgcggcggtgttaggtcgggcgtgggcgagagtacgaacgggttgtttgcgggttgagagcgtcgagttgttattatgggtgattacgtttggagttttttaaaggattttttggtcgggggcgtcgtcgttgtcgtttttaagatcgcggtcgtttttatcgagagggttaaattgttgttgtaggtgaggatcgcgcggtgtaagaggcgggcgcgggcgcggcgggtcgggcggggcgcgcgatgcggcgcgagttgtagggcgcggggcgtcgcggaaaatttgcgttaggttttagggtcgggcgttcgttcgttcgttcgtttttcgttcgcgggggaagaaggtgttttttgcgtagagataggtttagcgttagtcgtagatttttggtgtcgggtggcgttcggcgttcgggtgtttatatatggaaatttattcggagtcggtttacgtgtgttagattttgcgttcgtgatagtacgggcgtgtatttaggttcggaggtatttagtgattgttagtatttttggtatcgttttatgcgtacgtatttttataataaaaatattaaaataattattatttaagaatttttttatcgtattttatgtataatgttgtatgtaggttgacgtttttatttttatgtaatttttgtgagagagttatttttttttattttatagatgaagttgaggttttgaaatattaagaaataattttcggaataaatttagattattttgtttttaaattttttttttttttatttggtcgttgaatggtttattattttttcgtgtttttttttatttgtttaaaaggttagggttttttaatgaggaagagtttaatttgggagttagaattattaataataaaatttttataaattgtttataacggtagtaaatttttaataattgattatttggattatttgtttgaaaattttggaggtttaatgtttagtggatttatttttttttttttattagagtatttagtagagatttttatttttagggtgattagagtgatattgagaaattgttattttttggttattatgtttattaaatttaaagttttttgaagtagggagtgttatttatttttgttttttagtaagttttttatatagtttttaaatttagggaaagtgaaataaataaatggttatagttttatataatttaattatttttttagtttatttggggtaatatttttttttttaaatattttaataattgaagtaatattggattattttggtttgttatttagtaattaatatggataatagtatttatttatacgtttttagtatttatttgatttttttattttttttttttttaaaaaaaaaatttaggaagtgtaaattttttttttttttttgttttttttttttttttttattttgtttgttttttgttatttatttttttttttattagg

SEQ ID NO: 90 - DNA, 6500 bp, Artificial Sequence
  chemically treated genomic DNA (Homo sapiens)
tttggtggaggggagggtgggtgatagaggataggtagggtagagagaagggaagaggataggagaaaaaaaaaggtttgtattttttagattttttttttgaagaaaaaaaggatgaggaaattaaatggatattgaggacgtgtaaatggatattgttatttatgttagttattggataataagttaaaataatttaatgttgttttaattattagggtatttgagggaaaaggtattgttttaaataaattgaaaaggtgattgaattatataaagttatagttatttatttattttattttttttaggtttgagaattgtatgaggggtttattgggggatagaaatgagtaatattttttgttttaaagggttttggatttaatagatatgatggttaaaaaatgataattttttagtgttattttgattattttggagatgaggatttttattagatgttttaatagaggaaggagaataaatttattaaatattaggtttttaaagtttttaagtagataatttaagtaattaattattaagggtttgttgtcgttgtgagtaatttgtgggggttttgttgttagtaattttgatttttaaattgggtttttttttattgaggggttttgattttttgggtaggtggaggaaaatacgagaggatgataaattatttagcgattaggtaggggaggaaaagatttggagataggatgatttgagtttatttcgaaaattgttttttaatattttaaaattttagttttatttgtaaaatggagaagaataatttttttatagaggttatataaagatgaaggcgttagtttatatatagtattgtgtatgagatacgataagggaatttttgggtgatgattattttgatgtttttattgtaaaggtgcgtgcgtataagacggtgttaaaaatattggtaattattaggtgttttcgggtttgagtgtacgttcgtgttgttacgggcgtaggatttggtatacgtaaatcggtttcgggtgggtttttatatatagatattcgaacgtcgggcgttattcgatattaggaatttgcgattgacgttggatttgtttttacgtagagggtatttttttttttcgcgggcggggggcgggcgggcgggcgggcgttcggttttggggtttggcgtagatttttcgcggcgtttcgcgttttgtagttcgcgtcgtatcgcgcgtttcgttcggttcgtcgcgttcgcgttcgttttttgtatcgcgcggtttttatttgtagtagtagtttgattttttcgatgggggcgatcgcggttttggagacggtagcggcgacgttttcggttaggaagttttttaggaagttttaagcgtgattatttatggtgatagttcgacgtttttagttcgtaggtagttcgttcgtgttttcgtttacgttcggtttggtatcgtcgcgtagttttcgattttgcgcgacgttagggggtcgtcgtttggttcgtagtttttttttatattttcgtcgggttttcgcgagaggaggcgggtcgcggtcggcgttcgcgtcgcgtattggttgggtaggtgcggggcgttttttttttttagttgtagagggtatcgggggcgaaggcgttttcgggagcgaggttgggtcgggggttgtttttgtaatttgggacgtttaaagggtatatttatgttatttgtttcgtcgagtttagggaatatcgtgttatcgcggtatgtgggtcgcgtatttatagtataggtagttttaggtcggggcgaagtcggggtagatatcgggtcgttgtcgtcggtggagagtttttgatttttcggtttgtacgggtcgcgtttaggtttagggatttcgagttgtttttttttttttgtatttaaaggcgttttttattagagtttattgtttggatatgggtttttttagagtcgtgcgttttcgagaataaatggtagtttttttaaatagatattaaggttatttgatgttgtgattgttttatagaatttgataatttgttgttttttatttttttttatttaatcgttcgtttagttatttattttgttattatatattgatgtgtttggtatttagtgtttataggaaagatttggtgtagggggttattaggtgaatttatatttgtttttgtaaaattttgtgattttaaaatataggatattttttttgtaagtttttaaagggtttaatgtattattttgtttttagcggaattttagtatatattagggtagaatgttttgtttgttagtcggtgtttttttgagggttagtgttgttagtttttcggagatttagtttttggttgtatttgtttttttttaatgatagttggggttgaggaaatgttatttaattttaggaaattaattgtaattaattttttaaaatatataaatttgagttttaattttttttagtttgttttttaggtagtttatgtaattatataggtttttaaatataattgtttttttttttagaatgattgtaattcgtttttaattttaaattttttatttaattatttttttatgtttgttaatttttatttgtatttttaataaagtttatttattgttttataaattttttttttttaatatttgttgatattatgttagaggtttacggagttgtagttgcgtgttattttgggcgtggagattttggtatagtagaagttattaaggttttagggttatagagggtatgcgtttatttaagagtggggtaggttagagtttcgaaatttaggtaagtagaatgaaagttagaaattagtggaaagttgttagaggttagagtagatagaagttaagaattcggaagagataaatagataaattatgtatgtgtttatttaatagatttttgttgagtatgtattgtgtattaagaattaggtgtagttttgtggattgaatataagtagacgtggtttatttttaaagattttatagtttagtgtattcgttatttgttttattttattaaaattttatttattgatttttatggattagtataatttatatagtaaatttttttaattataatagtgtattgtattttattttgtaatatagagtatttgtttttatatttttattttttttttaattgtgtattagaattgtgttttatttttatgatgaaaaataggtcgggtgtggtggtttatatttttgggaggttgaggttggtagattatataggttaggagttcgagattagtttggttaatatggtaaaattttatttttattaaaaatataaaaattagtttggcgtgatggtttatgtttggaattttagtagtttaggaggtttaggtacgagattttcgagaggtagaggttatggtgatttgagattattttattgtattttagtttgggtaatagagaaagattttgatttaaaaaaaaaaaaagaaagaaagaaagaaagaaaggaaggaaggaaggaaggaaggaaggaaggaaggaaaattaatattgttatattgaaatttatataaattttatttttttttttaagttttttttttttatatattttttaaatggaatggatagatttaagatttttaaagttttgtagtttttgttatatattgataaattgttttttagaaatattaatttattagttatatagatgggtttttttttatatttttttttaatattggttttaaaaaaatagagagttggttatttgtgagttatttatgagttttagtttgtatttatttaattattatgaagttgtatatattttatatgatttaatttaatttgatagtttgataaggttttttttttgtataaatttttaattttttttgattattgttggagtgaaagtagagtatttatattaataataattttttatatatttgggataataaatatgtgttgaatgttttttattttgttgttttttttttgatatttattatattattttattagtgttatgaatagatttatggtatgatgatgatttattttatgttttgatgtaaatgtattttttttatagatatagtagtttatttattttagtatatatattagttttttttttttattttgagtagttatttttaaaatgtttaatattacgttttatattgtatggaggtatgggtttaattttatttttttttatattatgtttgggtattttaatattaatttttaagtagatatttttttttttttattatttgttttatattattaagtttagtttgttatatattaagtttttataatagttttaatttatgaaatatttatattatgatatatttatttgatttttattttttaaaaataggttgatatatgattttataattatttaaaaaataaagttttatttgtttatgtgtttggatttatttttattattaagttgtttaattgtttaaatattattagaagattttaaatagatatttaaattaaattaaatattaattaatatatgaatttaggaagtagtattatttttgttatatttaattttattaattagagttttggatattttttaaatgggagatatatttttttttggttattttttagttattttgttttatagaaggagttatagttggaatttttgataagaggttttttatggaaatttatatattgttttttgtttttacggatttttttagaaaagagaggttttatatgttttcgggagtatgagttgtttgtggttataagattttggtattatttatataggtaggggagagaatggcgttcggtagaatatgtgtttattcgtttaatttagtatttagtggtttttttttagtaggagaatggataaggtatttaggagatgagaagaaattttatttttaatcgtggatgggattttagatgttggtgggaatagggttatgtagaaatgagagtagggtggaaagttagttttttggaattttagtggaagtttttatagatttagttttttattaaattgggaatagagaatggaagttgttaaagagtaagagtgataaggaataaagaaaaataataaaggatgtgttaatggtggtgataatataatgtttgtgtgtaagtgtatatttaaagtattaggaattagaatatattattagtgtttgtttatatggtaagttttagtattaagcgaagaggattaagatatttatatgtgtatttatttatttatttattttagagatagtattttgttttgttattttggttggagtacggtggtataattatagattattgaaattatgtatttttaggtataagggatttttttgttttagttttttgagtagttgaggttataggtatatattattatgttcggatatatatattttttaatttgtaggttttgttgtggttttttggttttgttatgttgtttaggttatgtggagaagtttatatgttaggaatagatatagttgtggtgtttataggtaattttaacgtagtttggtaaggataaggatttaagagggggttttggttgtatttttagtagagtgatttttagtgtgttgtttttatcggaatttgtattttttacgttttatgaatgttcgtgaaataaaaagttttgttagaaggatttggcgttttattatttaaaggaggtgatttgagggggtagaggagtttttgaattatagaaaagatagagggattttttttagaaggtattttgttttcgggggaaattgatttaggttggttttttggttgttggaggtagggaggtttgggggattttcgtagtatatttttgatagatataggcggatttcgtgtattttttagatagatttagaatttttttttttttatttttaattttagtatttttttttattttgttgaagagtttaataagtatattgagtattatataatataacgaagttaatgtttatgtttgtataataatgtttttcgattataattatatattttttaggttggtattttttagttttgtttacgggtaatttttgtgaataaaatcgttatttatttggagttgattgggtttattttttaaatatattttgaattagtgttttgtgttttatatattttattaattatttttaaaaatatgttttatttttattattaaaattagtaggtaataaatgttattagagattattttttattatttgtattattgaagaataatattttgttattttaatgaataagggtttttttttatatgcgtttttttattttatgattttttttttatagttagttagacgttttgtgttattgttataggaaaaagaaaatatttaggaagtagaggaagtaagagtttattttcggtattagaatttttaaaggaagagaaaaaatttaagttta

SEQ ID NO: 91 - DNA, 5546 bp, Artificial Sequence
  chemically treated genomic DNA (Homo sapiens)
aggaaggatatatagatatacgggagattgtggtaattggcggggaagggtggttttgggaaaagagtaaatgaaataggttttttggagggtttttgagtttaatagttaaaaggttttcgtttaattttcgagttttttttttgtattttatttgtagtgggtttttggtgttgatcgttaggatttggtatttgaagtagtagagtttatagttttaggagtttttttcgttgatttagcggatgaggtagggttgatgcgtgtagcgtattgagtcgtcgtagcggtaggggtttaagagttttttttggaggaagagtgaggaggggttttgttagttattattatttcgattttatttagtcgcgtttttcgatagggaaattttttttttaggttatttttttattttaaataatttaggttttttatttaagatagggtaagaggttaagtaaggttgtaatagaaaagaagttttttttggagattaagggaaattttttatattaaagagatgaaagatggaaagggatggggggattagaggggagaagggttgggttttttttttttttagaatttgggatgggtagtttttaagattttttaaaagaaaggtttttttttaggatttggagggaggggagtgttagagtttttgagttatgtttttttttttttattttattattgtaaagttattttatagatttggcgtaaattgggatgggttatggttttcggtttttacgtattaaaaaggggagaaatcgcggaggtgggagtgaagggtgtttttttttaattatggaattaatttttattatatagagatattttttggtattattttgggataattttgtttataaaattttaataaagaatattttttagaatgagatagaaagttgtagaatgggaagtgaaaaaaagtgttttacggggagaaatattgagttaagtaagggcgttggttgggtttttttttttaaggggggtatagaagtatttttttttttgtttatttgtaagagaataggtttttttagtttacggagattttggggcgagggaaataggagagaatagtagtttttgttaatgggtgagagggattttgcgtttttcggggagaaagttttatttttttttggggatttttgatttttcgatataaataagcgttttaggagttttttgttagtttttcggttttattttatttttatttcgtgttttggggttcgtttagtttttttaggcgtcgcgtttgttcgcggttttcgttgatattttaggtgcgcgtttttatttttcgcgttcggttaggtgtttaggtttgatttgtttcgggttttggaagtagattcggtattgaggggttcggagttcgttgtttaggttattgttgagcgatagggcgtttagcgcgttcgggggcggtagcggcggcgcgggcggcggtaggggttcggttcgcggttttttgtcgtcggttaggtttcgggttcgcggtttcgattcgtagtattttttttcgtcgtcgtcgtcgtttcgggtggagtagttagcgaagggcgtttagtcgtagtcgttttttcggttttttcggggttgcggttcggttcggggtcgtttttcgtttgttagtattagtagttttagttcgtttagaaatatgcggagtcgagatttgagtatcgttcggatatcgggggcggggggtagcgtgtaaggggggttcgttagcggcggggggaggggagaggataaggtcgggaagggggcgcgcgttagagagtcgagtcgggtcggggttttcggggtttgcgatagtcgtttattgttgttatcgtcggggtttcggtgtttgcggggtcgagcgggttggcggttcgggggcggcggggtgggcggttatggttagggtagggggcggggaggggggtttagggtgtcgtatttcgcgggtttgggtttggagcgggtcgggttttcggggttacgcgttcgggtttttttgcggcggggtcgttttttatcgtcgttttttcggttttagttttttttcggtttcgggattaggtttggttcggttcgtgcgttcggcggtggtaaatgtcggtttttttcggcggcggcggcggcggagattttttcggagtggcgggcgggcggggcgggcgtcggggagcgggtgaaggatggagggaggggcggggcggggagggggagaggagaaggggtcgcggttgcgtattttcgcgggtgtttcgtacgagtaggtgtttttaggggcgggggtaagtgtgggatttcgaggagggtggaggaaggggagtggttaaggaaggggagtgtgtatataagttgattaggtgtgtgtttgggagtgggggatgagcgggtgagtatggaaggtgagtggttaaatgacgtaggtgtattagggagggtgaggtttgtgtaaaatgggaatgtgtaaagaaagagttgtgtaagtgtcggaggtgtgagggaggtatatgggtaggggtgggatttagtaatatatttttatttaagggttgaaaagtgtgatcgatggggattgggaaagagaggtgtgtaaggaatggatcggaaagttttattattgggaaagagggtgtgtaaggaatggaatcggattgtttgagaaatagaagtttgtgattgtaatgtgtgaaggaggtgagggagggagtaggggaggtaggcgtgttaaagggatgggagtgttttttttggtatttttttgtttttatttttattatattgaagtgaataatatatatatttatttttttttttttatggagatttttttttgaggttaagttttatttttattatattttttttttttttatatttatattttttttttttttttttttgtaaagttgagggaaaagggattttaggggagtttattgggttaaatatattgggaaaaaatttaattagtgaaagagtaattaatagaagaagggaggggatagagtttgggatagattgttaaattaaggttttttaatagaaagtgatggagagatagtaatgtttttatgaagtatttaaatgttttggatggattaatgaatgaattagaaaaaggggttgggatttaagtagatagagaggacgttttttgttgtaaagatagtaagttgtgaaggttttatgtggaaggtgaggttgaagtggggaatgttggtgtgggaagggagtttgaaaaatttatagataattattttagttttttagaaggtttataaagtatttatttttagtaaggtagttaataaaatatttattttttgagttttttagttagtttagtttttgaggttttttttattagtgttttagttgtttttgttaggaggggtttagggttataagtattaggatggaaagaggaggtatttgtattaatatgtattttattttgttttaagttatggtttatatttattttttagtttgaatttttatatttttagttagatggttaaggaaaatagaagttagagtggaaggagtggtaaatagggtaataaaatggttttagattttagataaatttttataaatgagatattaatcgttttttttttttatttttatatttttaaagggttgggagataaagattttggagttaataaaataaagtaggagaaatttatttgtgtttatttaggtgtttgggtagaggttatttgggaataagtgtgttttggatagtgttaagtgttaagaaagcggtattagggaaaaagagggaagtataataattttaaatgagtagttataaggtttgtagaagggggtatgttatttttatttattgtggtggtttggagggtgtagggggtgtggtggtaatttttttgtatatgtgtaattttgtattcgttttatatatgatgtgataaataatattatatatatatatatatatatagaagtatatatgtatatatataaatattatataattatagaatttttttattggaaaaaaaaaaaaaatttaaaaggttaagtatttttgttttttgtttattaataatttttttgttagatggttttaggtttttgtattaatatttttagggaggtttggaagttggaaaagtgagaggattattttgttattgagtttgttggattattgtattaatttgtttttcgttattttttaatcgtagttttgtttttaaatgggtattgtttattttttattgtagaagattttattgttggttatatttttatagatagtcgtattattattttaaagggttagtgatagatattaaaaataaaataaaaatttatatatatattggaagtaagtatttagtaaaatgttgtagaattaatgaatgaaataatgatataaatgagagtatgtttttttatggtggagcgaaaaggtgatagtattatttttggtattttaatttttattttttttttaatgtagataggttgaaagatcggtagtgagattggagtttagtttttagatcggtagtgagataattttttagtcgggagttgggttttgggtggtttaggttgttatggtatcgtttcgggttttatttttttttgttttttttatcgttttttttttgtagcgggggttgtggtagttagttacgtgttcgtcgcgtagttatatttttgttttttagagtaatgttaagcggttacgtgtgatagtaatagattacgtggttgttatcgttttttcgtttttttatatttttcgttttttttttagtcgaagtattttttgttcgttttttagcgtatgggtggcggttacgtgtttagaacgttcggcgttcgtttcgtttttttagttttcgcgcgtttttttggtagttggttatatggtgagggtgggggtgagggggtttttttagtttgcggtttgtgtttatggtcgggttttttgcgtttagttgtttcggatcgagttcgggtgtatggggtcgtaggaatcggtttcggggtttcgataacgggtcgtttttatagtatttcgggttggcgtgaggtaagtgtagtttttttttaggaatgagaattagtgttcgttttttttatagttttttacgcgttcgtttcgcgagttggttatggaagggtcgtttaagggcgggaagtggggtttttgtggttatgggaaagtataattttagggattgaggtgtaggattttcgatgtaaggtatgtgttatgtgtgatttttgtgcggggcgcgattgttttaaaggaaaaagcgttttttattgtagggttttacgtggttggaggggttggtattgagttattgtgttatttttggggtcggttttaaggaagattgggagcgggggatgggatgttggtggtgttttttgcgttttttttttgggagtttttttgttgttgtaggtttatattattttaattttgtaagcgatttttggtgataggagtttgtgattgtagg

SEQ ID NO: 92 - DNA, 5546 bp, Artificial Sequence
  chemically treated genomic DNA (Homo sapiens)
tttataattatagatttttattattaaaagtcgtttatagagttaggatggtatgagtttgtagtaataaagggatttttaaaaaaaaagcgtaaagaatattattagtattttatttttcgtttttagttttttttggggtcggttttagagataatataatgatttaatattaatttttttagttacgtgaggttttgtaatagaaaacgtttttttttttgggataatcgcgtttcgtataaagattatatatgatatatgttttgtatcgaagattttatattttagtttttaaaattatatttttttatgattataaaggttttatttttcgtttttgagcgatttttttataattagttcgcgaaacgaacgcgtggaaagttgtgaggggggcgggtattggtttttatttttgggaagggattgtatttattttacgttagttcggggtgttgtgggggcggttcgttatcggggtttcggagtcggtttttacggttttatatattcgagttcggttcggagtagttggacgtagagggttcgattatagatataggtcgtaagttagagaggtttttttatttttatttttattatgtgattagttgttaaagaggcgcgcggaaattgggagggcggggcgaacgtcggacgttttgggtacgtgatcgttatttatgcgttgaggggcggataggaggtgtttcgattgggaggagggcgaagagtgtaagggggcggaggggcgatggtagttacgtgatttgttgttattatacgtgatcgtttgatattgttttgaggagtagaggtgtggttacgcggcgggtacgtgattggttgttataattttcgttgtagggggggagcggtgagggggataagagagggtggagttcgaggcggtgttatggtaatttaggttatttagagtttaattttcggttgaaggattgttttattatcggtttgaaggttgaattttagttttattatcggttttttagtttgtttgtattggggagggggtgggagttggggtattagaggtgatgttgttattttttcgttttattatgagaaaatatatttttatttgtgttattgttttatttattaattttataatattttattgagtgtttgtttttagtgtgtatgtgggtttttattttgtttttggtgtttgttattggttttttaaagtagtggtacgattatttataaagatgtagttaataatggggttttttataatagggagtaaataatgtttatttgagggtaaaattacgattaaaggatgacggaaggtagattaatatagtaatttaataggtttagtgataaggtaatttttttatttttttaatttttaaatttttttgggagtgttaatgtaaagatttgaggttatttggtagagaagttattgatgagtaggagataggaatatttgattttttaagttttttttttttttttagtaggaaggttttatgattatgtgatatttgtatgtgtgtatatatgtttttatgtatatatgtatgtatatgatattatttattatattatatataagacggatataggattgtatatgtgtaagaaagttattattatattttttgtattttttagattattataatgaatgaaaatgatatgtttttttttgtaaattttgtgattatttatttggagttattgtgtttttttttttttttttagtgtcgtttttttagtatttagtattgtttagaatatatttgtttttaaatggtttttgtttagatatttaggtagatataagtagattttttttattttgttttattggttttaaggtttttattttttagttttttgggggtatgggagtaaaggaggaaagcggttagtgttttatttgtgagaatttgtttaaaatttaaagttattttattattttatttgttattttttttattttaatttttgttttttttaattatttggttgagaatataagagtttaaattagaagatgaatataaattatgatttagagtaaaatagaatatatattaatatagatgttttttttttttattttgatatttgtagttttgggttttttttggtaagggtagttggaatattagtaagaaaaattttaaggattgaattgattaaggggtttaagaggtgaatgttttattggttattttgttaggggtgggtgttttgtaagttttttggaaggttaagataattgtttgtgagttttttaaattttttttttatattagtattttttattttagttttattttttatataagatttttatagtttattgtttttgtaatagaagacgttttttttgtttgtttgggttttagtttttttttttgatttatttattagtttatttaaaatatttgaatattttatgggaatattattgtttttttattattttttattgaggaattttaatttggtagtttgttttaggttttgttttttttttttttttgttaattatttttttattaattaaatttttttttagtatgtttgatttaatgagtttttttggaatttttttttttttagttttgtaaaggggaggagagggagaatgtaagtgtaagaaagaaaaaaatgtgatgggggtagaatttggttttagagggaagtttttataaaaggaaaggggtaagtgtgtgtattgtttattttagtgtagtggaggtgagggtaggagagtattaggaaagatatttttatttttttagtacgtttattttttttgtttttttttttattttttttatatattataattataggtttttgttttttagataattcgattttattttttatatatttttttttttagtgatgaagtttttcgatttattttttatatattttttttttttagtttttatcgattatattttttagtttttgggtaaaggtatattgttgagttttatttttgtttatgtattttttttatattttcgatatttgtatagttttttttttgtatatttttattttgtataagttttattttttttggtatatttgcgttatttaattatttattttttatgtttattcgtttattttttatttttagatatatatttagttaatttgtgtgtatattttttttttttggttatttttttttttttatttttttcgggattttatatttgttttcgtttttggggatatttgttcgtgcggggtattcgcggggatgcgtagtcgcggttttttttttttttttttttttcgtttcgtttttttttttattttttattcgtttttcggcgttcgtttcgttcgttcgttatttcgggggggttttcgtcgtcgtcgtcgtcggaaggagtcgatatttgttatcgtcgagcgtacgggtcgagttaagtttgatttcggagtcggagggggattgggatcgagagaacggcgatggggggcggtttcgtcgtaggaggattcgggcgcgtaatttcgggggttcggttcgttttagatttagattcgcggggtgcggtattttgagttttttttttcgttttttgttttggttatggtcgtttatttcgtcgttttcgggtcgttagttcgttcggtttcgtaagtatcggagtttcggcggtggtagtagtgaacggttgtcgtaggtttcgaagatttcggttcggttcggttttttagcgcgcgtttttttttcggttttgttttttttttttttttcgtcgttagcgagttttttttgtacgttgtttttcgttttcggtgttcggacgatgtttaagtttcggtttcgtatgtttttgaacgagttgaagttgttggtgttgataggcggggggcggtttcgggtcgagtcgtaatttcgggggggtcggggaggcggttgcggttgggcgtttttcgttggttgttttattcgggacggcgacggcgacgaggaggagtattacgggtcggagtcgcgggttcggggtttggtcggcgataaggagtcgcgggtcggatttttgtcgtcgttcgcgtcgtcgttgtcgttttcgggcgcgttggacgttttgtcgtttagtagtagtttggatagcggatttcgaattttttagtgtcggatttgtttttagggttcggagtaggttaggtttgggtatttggtcgggcgcggagggtggaggcgcgtatttggggtgttagcggagatcgcgagtaggcgcggcgtttaaggaggttgggcgggttttaggatacggagtgggaatggggtgaggtcgaggggttggtaggggatttttggagcgtttgtttgtgtcggagggttaagggtttttaggaaggggtggggtttttttttcggagagcgtaaaattttttttatttattaatagggattgttgtttttttttatttttttcgttttagggttttcgtaagttaaggggatttgtttttttgtaggtgggtagaaaggagagtgtttttgtgttttttttgaagggaggggtttagttagcgtttttgtttagtttagtattttttttcgtggggtatttttttttattttttattttgtaattttttattttattttaaagagtattttttgttaaaattttatgggtaaagttgttttagaatagtgttagggggtgtttttgtgtagtgagaattgattttatgattaaagggaaatattttttatttttattttcgcgattttttttttttttagtacgtggaaatcgaggattataatttattttagtttgcgttagatttgtgaagtaattttataatgatggggtgggggaaggaaagtatggtttagaagttttaatatttttttttttttagattttaagaggaagttttttttttgagaagttttaaagattatttattttaaattttaggaaaagagaagatttagttttttttttttttaatttttttatttttttttattttttatttttttggtatgggaagttttttttgatttttaagggaagttttttttttgttgtagttttatttagttttttgttttgttttgggtgaaaggtttgagttatttaaggtgggaaagtgatttgaagaggaggtttttttgtcggggagcgcggttgagtggggtcggggtggtgatggttgatagggtttttttttattttttttttagggggagtttttaagtttttgtcgttgcgacggtttagtgcgttgtacgtattagttttgttttattcgttggattagcgagaggggtttttggagttgtgagttttgttattttaagtattaggttttggcgattagtattaagaatttattgtaggtgaggtgtaaggagaggattcggagattgggcgaggattttttagttattggatttagggattttttaggaagtttattttatttattttttttttaaagttattttttttcgttagttattatagtttttcgtgtgtttgtatatttttttt

SEQ ID NO: 93 - DNA, 5976 bp, Artificial Sequence
  chemically treated genomic DNA (Homo sapiens)
agaggggtattttttattttaatttgaattttatgattgtattttttgttaggagatgaaagggataagattgtttgaaggattaatttttagtttttaggtaggttagtggttaaaatatttaggaagtgaaagtttgttttttgttataaggaaatttggagtttgtgattttattatgcggggtttgttatttgttaggtgatagggttttttatttatttgcggtgatttgaagggtaaggtttttggttaaatattttttttttttagtgatgtttgaaattttattgttagcgttggattttagtaagattttagagaaagtttaatttttggagtttgggttttttttagttgagatgttaggaaagtaatgggttttattatttgtacggataggtttgtgtatagttttaggggatttagggattttattagagtttatttatagatattaggttaaaagttttggatagtatttataatttttttgaaagaagaaaagtttttttttagagttttttttaaagtgtaaatggttttgggaggttcgaaatgatgagttggtcggtatgaaagaattttttttagtagatgtaagagataatttgaggagttttagtggcgggggtgggggaaggagagtttgggggaggggaggttttaggtagtttataattttttttagaattggaaagggaatgtattgggttaagagggttaattatttatttttgtagagtgtttataagaattttatgaattaagtgttattaatatttttattttatagatgaggaaattaagatggtggagataaaatgatttatgttttttaattaatggtagagttagaagtgaatttaggttggagtgaagtggttttagtgtttaaatgatttttttattttagtttttagagtagttgggattataggtatgtattgttatgtttagttaatttaaaataatatttgttggggagatggggttttattatgttgtttagattggttttaaatttttgggtttaagtaatttttttattttttaattagttttttaaagtgttgcgattatagttgtgagttattaggtttgtttaggtatttttgtttgatataagagaaaatagagggtaggtatagtggtttatatttgtaattttagtattttgggaggttgaggtaggtggattatttgaggttaggagtttgagattagtttggttaatatggcgaaatttcgtttttattaaaatataaaaattagttagatatggtgacgtgtgtttgtaattatagttatttaggaggttgaggtataagaattttttgaatttgggaggtagagagtgtagtgagtcgagatcgcgttattgtattttagtcggggtaatagagtaagattttgttattaaataaataaataggaaatagagaagtaatttagtgtgttgcgaaagttatatagtatttgttttttataaggagtttttttgtgttttcgttttattttggatatttgatttattgtttttggagtttggagaaggatttgtcgagaagtttgaagaatgtattaggtttgatttgattttgttgtttttaattgttttttaaaattttttttattgaattattagagtgtaatggaagagtcgatgagagtcgttgtagagttacgaggttaaggtttgttgggtagaagaaagtaaagttttaaaggtttttagggtttagcgatggtataaaatatgtatttttatataattgagaggaaaaaaataagtagatagtatagttttatgggggaaacgtttttttttgtatttttattattttgtttaaggtacgattttagtgggaaaggaaatatcggagttttttttttttgagttttttggtgggttaagagtagagggagttaaaatacgatatttaaaagatttgattggaaatttattaaaattgaggggataggttgttggggggggcggtgttgggttgtttagaaatcgtttgtatttgagaaattatttgatggatttagaggtatttttagttttgggtgaaatattttaaatatggttttttttaggaggaagcgaaataggggttgggttttttgaaagagtaatttttattttaaatatttattgagtagttgttatgatgagttaagaattttgtttagcgattgtttttgtattagtttatgttaatttatttatataaaggagaatattgatttttttaaggttatagggttagtgagtggttgattttatttaatgttgtgtagttttaattatgtttgaaggataaagggaaaggaggtgtttttgtcggggtagataagttatttagacgtggttggttatagggagttagatagggaagttgtttaatttaatatttgtttgtttattttgtttttgttttttgatggaggacggcgggtgttggagggttattggtttaggatttgagatttttggtttttatttattttatttttgattttaaaattattttattggggatagaattttttggagaaggtgatggtggttatggtgtggttgtggtattaaaagttttattttgggggttagaagattttgggttttggtttttggttttgatattgatttgtttatgtgatattgaataagttatttgtaaattataggtttgggtgaattttaaaggttttttttaggttaatattaaaaaatagattgaaaattgtagttttagttggaagattgggattatatgagatgaagttgattgttagaagaaaggttttggaattagagaggttggttttagttttgcgttattttttattggttttaatttttttaagttttagttgtttatttattatatgggaataataatatagtttttgggttgttttgaaatgagtttaaatgagttggttagtggttgggtacggtggtttatgtttgtaattttagtattttgggaggttgaggtaggtggattatttgaggataggagtttaagattagtttggttaatatgatgaaattttgtttttattaaaaatataaaaattagttagtcgtggtggcgtatgtttgtaattttagttatttaggaggttgatagaggagaatcgtttgaatttaagaggcgaaggttgtagtgagttaagaatatattattgtattttagtttgggcgatagagtaggatttcgttttaaaaaaaaaagagttggttagtgttaaatgtttagtatagagattggtatagtaatttttaatgtttagtatttattgttattattttttttttttttttttttttgagatagagttttgttttgtcgtttaggttggagtatagtggcgcgatttcggtttattgtaagttttattttttaggtttatgttatttttttgttttagtttttcgagtagttgggattataggcgtttattattacgtttggttaattttttgtatttttagtagagacggggttttattgcgttagttaggatggttttaattttttgatttcgtgatttgttcgtttcggttttttaaagtgttgggattataggcgtgagttattatgtttggttttattgttattatttttattttttatttttgtatagagtatttatggtttaagaaatatttgttattttaattgtatgggagttttataatagtatagggagatatttttgattattatttttattaggagggtggagaaattgaggttttgggaggtggttttgatttagggaattaatttgttgatttattaatttatgaagttttatagttaaaaaagattagattaaaaaatgagaatttagtaaaggggttgaggtaggaggatcgtttgagtttagaaatttgagattagtttcggtaatatagtgagattttttttttagaaaaattttttaaaaaattaggtcgttcgaggtagagtgtagtggtttacgtttgtaatttaatattttaggaggttgaagagggtggattatttgaggttaggagttttagattagtttggttaatatggtgaaatttcgtttgtattaaaaatataaaattagtcggtgtggtggtatacgtttgtagttttagttatttaataggttgagataggagagttttttgaattcggtaggcggaggttgtagtgagtcgagatcgtgttattgtattttagtttgggtaagatagagcgagatttcgttttaaaaaatataaataaaataaataaataaaaaattaggttgttagtttagtggtttatggtttatatttgaaattttagtattttgggaggttaaggtaggaggatcgttttagtttaggagttcgagattaggttgggtaatatagggagatatagcgtttttattgtttttgttcgtttcgatttgtttttttataaaaaggtaaaagaaaaaaaaattagtttggcgtggtggtgtgtatttgtatttttagttattagagaggttggggttagaggatcgtttgagtttaggagttcgaggttgtagtgagttgtgatcgtattattgtattttagtttgggtgaaagagtgagattttatttttaaaacgaataaataaaaaattttaaaaaataaaagaatttagttaagtgtaaaagttttttttgattttaggttttagtgagttatcggcggggttgggattcgaatttagtggaattagaatcgtgtaggttttataatttatttagattttagtaattttaggttagagggttatcgcgtttatgcgaggtcgggtgggcgggtcgttagtttcgttttggggaggggttcgcgttgttgattggttgtggtcggtaggtgaatttttagttaattagcggtacggggggcggtgttttcggggtttatttggttgtagttacgtatttttttttagtggcgtcggaattgtaaagtatttgtgagtttgcggaagttagtttagattttagttcgttttagttcggttcgattcgatcgtattcggcgtttgttttcgttcggcgttttcggttagttatgggtttttggagtcgtagtttttcggcgttgttgttgttgttgtaggtatttcggattttttgatttgcgagggacgtattcgggtcgtaagtttcgcgttttagttttgcgtttttttttttttcgtcgttatcgtttttttttttttaagaaagttcgggttttgaggagcggagcggtttggaagtttcgcgcgtttcggattttttagtgatgggagtggggggtgggtggtgaggggcgagcgcggtttttttgttttttttagcgtagatcgaggcgggggcgtttggtcgcggagttcgcggggtgggttcgcgcgggcggtgggggcgtgaagcggggtgtagggggtggggtgtggagaaggggtgttttggtgtaagtcgagggggagttaggagtcgtggggacgattttcgagggaaggagaggggtattcgtagaaataaaggtatttgttatgttaagaaaggtcgtaaataggagtgagggtttcggggataagaaagtgaggtcggaggaggtgggagcgtttttcgttttgaggagtggtgtattttcggtttaaggaaagtggggtattggagaataaagatatttttaataaaatgagaaaggagattgaaagggaacggtgggttaggttttgagggggtgattcggcggttttttttcgggagtttttgggggttcggcggtcgtaggtttcggggtgggggagggtgacgtcgttgttcgttcgtttcggggttgcgggttggggtttttttttaatttcgacgtcgggagcgagggaggggcggcgttgttggtttcggtgagtaggagggaatttttcgagttattcggttttatttattttttttttattttagg

SEQ ID NO: 94 - DNA, 5976 bp, Artificial Sequence
  chemically treated genomic DNA (Homo sapiens)
tttggggtgggggaaaggtagatggaatcgggtgattcggagggtttttttttgtttatcgaaattaatagcgtcgtttttttttcgttttcggcgtcgggattgggggaggattttagttcgtagtttcgggacgggcgggtagcgacgttatttttttttatttcgaaatttacggtcgtcgagtttttaggaattttcgggagggggtcgtcgagttatttttttaagatttagtttatcgtttttttttagtttttttttttattttattggagatgtttttattttttagtattttattttttttagatcgggaatgtattattttttagagcgaggggcgtttttatttttttcgattttatttttttattttcgggatttttatttttatttacgattttttttggtatggtaggtgtttttatttttacggatgtttttttttttttttcgaagatcgtttttacgatttttggttttttttcgatttgtattagggtattttttttttatattttattttttatatttcgttttacgtttttatcgttcgcgcgagtttatttcgcggatttcgcggttagacgttttcgtttcggtttgcgttggagggggtaggaaagtcgcgttcgttttttattatttattttttatttttattattggggggttcggagcgcgcgaggtttttaggtcgtttcgttttttaggattcgaatttttttggaagaagggaagcggtgacgacgggagaggaaggggcgtagggttggggcgcggagtttgcggttcgaatgcgtttttcgtaagttaggggattcggggtatttgtagtagtagtagtagcgtcgagaggttgcggttttaagggtttatggttggtcggggacgtcgagcgagggtaggcgtcgggtgcggtcgggtcgggtcgggttggagcgggttggagtttgaattgattttcgtaagtttataggtgttttgtagtttcgacgttattgagagggggtgcgtggttgtagttaggtgagtttcggaggtatcgtttttcgtatcgttgattggttgagggtttatttgtcggttatagttaattagtagcgcggatttttttttagggcggagttgacggttcgtttattcggtttcgtatagacgcggtgattttttagtttggagttgttagggtttaggtgggttatgggatttgtacggttttgattttattgggttcgaattttagtttcgtcggtggtttattaagatttgggattagaaagggtttttatatttggttgagtttttttgttttttgggattttttgtttgttcgttttggagatggggttttatttttttatttaagttggagtgtagtggtgcgattatagtttattgtagtttcgaatttttgggtttaagcggttttttggttttagtttttttagtagttgggagtataggtgtatattattacgttaggttaattttttttttttttgtttttttgtagagagataagtcggggcggataggggtagtgggggcgttgtgtttttttgtattgtttagtttggtttcgaatttttgggttgaagcgatttttttgttttggttttttaaagtgttaggattttaggtgtgagttatgagttattgagttagtagtttaattttttgtttgtttgttttgtttgtattttttgagacggagtttcgttttgttttgtttaggttggagtgtagtggtacgatttcggtttattgtaattttcgtttgtcgggtttaagagatttttttgttttagtttattgagtagttgggattataggcgtgtgttattatatcggttaattttgtatttttagtatagacggggttttattatgttggttaggttggtttggaatttttgattttaggtgatttattttttttagttttttgaagtgttggattataggcgtgagttattgtattttgtttcgagcggtttaattttttaaaaaatttttttagagaggggattttattatgttgtcgaggttgattttaaatttttgaatttaggcgatttttttgttttagtttttttattgagtttttattttttaatttagttttttttaattgtagagttttatgggttagtgagttagtaaattgattttttaggttaggattattttttaaagttttagtttttttatttttttaatgggaataatgattagaaatgtttttttatgttgttgtgggatttttatataattaaaatgataaatgttttttgagttataaatgttttgtatagaagtgaggggtaaaaatagtaataatagggttaggtatggtggtttacgtttgtaattttagtattttgggaggtcgaggcgggtagattacgaggttaggagattgagattattttggttaacgtagtgaaatttcgtttttattaaaaatataaaaaattagttaggcgtggtggtgggcgtttgtagttttagttattcgggaggttgaggtaggagaatggtatgaatttgggaggtggagtttgtagtgagtcgagatcgcgttattgtattttagtttgggcgatagagtaagattttgttttaaaaaaaaaaaaaaaaaaaaaatagtaataataggtgttggatattgaagattattgtgttagtttttgtgttaagtatttgatattgattagtttttttttttttgagacggagttttgttttgtcgtttaggttggagtgtaatggtgtgtttttggtttattgtaattttcgttttttgggtttaagcggtttttttttattagttttttgagtagttgggattataggtatgcgttattacgattggttaatttttgtatttttagtagagatagggttttattatgttggttaggttggttttgaatttttgtttttagatgatttatttgttttagttttttaaagtgttgggattataggtatgagttatcgtgtttagttattgattagtttatttaagtttattttaaaataatttaagagttgtattattatttttatatgatagatgggtaattgaagtttagagagattgaggttaatgagaggtggcgtaggattggaattaatttttttgattttagggttttttttttaataattagttttattttatgtggttttagttttttagttggagttgtagtttttagtttgttttttgatgttgatttggaagagatttttagagtttatttaaatttatgatttgtaaataatttgtttaatgttatataggtaggttaatgttaaagttaaagattaaaatttaggattttttgatttttagagtggggtttttaatgttatagttatattatggttattattattttttttagagaattttgtttttagtgaaataattttaggattaaaaatagaatagataggggttaaaggttttaggttttgggttagtggttttttagtattcgtcgttttttattaaaagataaaaatagaatagataggtaaatgttaggttagataatttttttgtttgattttttgtggttagttacgtttgggtggtttgtttatttcgataagggtattttttttttttttattttttaagtatggttagaattatatagtattaagtggagttagttatttattagttttgtgattttggggaagttagtgtttttttttgtataagtgaattggtatgagttaatataaaaataatcgttaagtagagtttttggtttattatagtaattgtttaataaatatttggagtaggggttatttttttaaaaggtttagtttttatttcgtttttttttggggaaagttatgtttggaatattttatttagagttaaaggtgtttttgagtttattaagtaattttttaaatgtagacgatttttgggtagtttagtatcgttttttttaataatttgtttttttaattttaatgagtttttaattaggttttttggatgtcgtattttggttttttttgtttttaatttattaggaggtttagagggagaaggtttcggtatttttttttttattaggatcgtgttttgaataagataatggaaatatagaaagaggcgttttttttatggggttgtattgtttgtttatttttttttttttagttatgtaaaaatatatattttatattatcgttgggttttgggagtttttagggttttatttttttttatttagtaagttttggtttcgtaattttgtagcgatttttatcgatttttttattatattttgataatttaataaaaaggattttagaaaataattaggggtagtaaagttaggttaggtttgatgtattttttagatttttcggtaagtttttttttaagttttaaagatagtagattaggtgtttagggtgaggcgggaatatagaggggttttttgtggaagataggtgttgtgtgattttcgtaatatattgaattgtttttttgttttttatttatttatttagtgataaggttttgttttgttgtttcggttggagtgtaatggcgcgatttcggtttattgtattttttgttttttaggtttaagagatttttgtgttttagttttttgagtagttgtgattatagatatacgttattatgtttggttaatttttgtattttagtagagacgggatttcgttatgttggttaggttggttttaaatttttgattttaagtgatttatttattttagttttttaaagtgttgggattataggtgtgagttattgtgtttgttttttgtttttttttgtattaaatagggatatttaagtaggtttggtggtttataattgtaatcgtagtattttgggaggttagttgggaggtgagaagattatttgagtttaggagtttgagattagtttgggtaatatggtgaaattttatttttttaataaatattattttgaattagttggatatggtagtgtatgtttgtagttttagttattttggaggttgaggtaggaggattatttgagtattggagttattttattttagtttggatttatttttggttttgttattagttgagaagtataagttattttatttttattattttggtttttttatttgtaaaatgggaatgttgatagtatttaatttataaggtttttgtaaatattttgtaaaggtgagtgattagtttttttggtttaatatattttttttttagttttaggaaaaattgtgagttgtttggagtttttttttttttaggtttttttttttttattttcgttattaaagttttttaggttattttttgtatttattggagaaaatttttttatgtcggttagtttattatttcgaattttttagggttatttgtattttaaagagggttttagagaaagatttttttttttttaaaggagttgtaaatgttgtttagggtttttaatttggtgtttgtggatgggttttggtggggtttttgaattttttgagattgtatataaatttgttcgtgtaggtgataaggtttattgtttttttaatattttaattggggaaaatttaaattttaggagttgagttttttttgagattttgttgagatttagcgttaatagtggaattttaggtattattggggaaaagaaatgtttggttagaggttttgttttttagattatcgtagatagataagagattttgttatttggtagataatagatttcgtatgatgggattatagattttaggtttttttatggtagaggatagatttttattttttgggtgttttggttattggtttgtttggaggttaaagattaattttttaggtagttttgttttttttattttttggtaaggggtgtagttatagggtttagattggggtgggaggtgttttttt

SEQ ID NO: 95 - DNA, 8666 bp, Artificial Sequence
  chemically treated genomic DNA (Homo sapiens)
ttgtagggttttttttagtttaaagaaagtaattaggtgtttttattgtgttatgatttttatttttagttgggttttttagtttggttttaaagaataaaataaaaggtttttttgtttgagttttatttaatttattttttttatttataagaggtattttaaatttttacgatttttaaattttttaatcgattattttatttttattttgtaaataagttaatttttttatttatagaaggaagtgttttaatttttttttcgttttgatttttttttttttttaaatttatgtattttttgtgataaaatttataattatcgttgtattttgagttttatttttttattatttttgagggattttaagtttttaaaaatattttattttgtttgtgtatttaattttttttttatttttttttaatttttttttttttttatttggtatttgtttttttaggtatatgtgtgtttaggttttttttattttttatttgttttattttatggtatagggttttgaattattataattaagttatgaaagagtagttaacgtagtgtttttatttttttgttattttattattttagttttttttttggttttttgaggagttttttataggttggtttttaggaataagtttaaatgaattatttttagtttttttaaatttttatgtttttgtatatttttttatttttgtttagaatattttttttttttttttttatttttaaatttttatattattttttaagattgggattagtttttagtattcggaagtttttgtttattagagataaatgagaatgagtttggttatttttttatttttttgtattattttgtgttttattttgtttttttaagagtattatatgttttatttaatttttaaataattgtttgaggtaagtatagttattattttaattatgtaaatgagaaaatagaggtttagatatgttgagtaattttgataaaagttaaagaattaataagtggaatagttgaggtttgaattttggtagtttgattgtagagatattatgtttgatttatttttttttgtttttattttatgtttgtttttagtttttgagtttgttgaatgaatgaataggtggtagtttttttttgttataagattgattagaattaagataggtttaaattttacgtgtagaatttttaaaattgtaaaggtagtgtaaatttaaaaaaagaatggtatttttaggaaagaggaaaagtaagtgtgagaataataataataataattaataaattttagtaaatttagtaaatgtagtaaatttttatattaaaagtttttggatatatattattatattttatggttatatgaaatatattataattttattttgtatataggaaatttgagattggtataaggagtatagagatttaggattttatatttttatttttttaggattttgtattttaggtcgatatgtatgagtaaattgggagtataatgggttttttaatagaaaaattaggaaagtttttttattattattaattatttatataatatttttttaattttattattatttatattttaagttttagagtatatgtgtataatgtgtaggtttgttatatatgtatatatgtgttatgttggtgtgttgtatttattaatttattatttagtattaggtatattttttaatgttatttttttttttttttttttatataagatttataatggataatggattttaatttttagagtaaaatggttttatttaaggatgttataatttttttagagttttattgtaagatatgagatatatatatttaaaatttgtttttggtatttttaaagtagttaatttttatatttgtttataatgtatttaaatgttgtttttatatggttgtattttttattttttttattaatagttatatatattttttataagagttgaaagagtttttgatgtaggaatttatggtagagttttagagaaatttttgaatttattgaaagttttatttagaaatatatgtgtaagtgaatatattttttttaaaaaaaattattatttatttttttttttgagaagaaggtatttattttaatagatttttgaaggagtttattttttttatttttttatttttattaagaattattgtaggtcgggtacgatggtttatgtttgtaattttagtattttgggaggttaaggtgggtggattatttgaggttaggagttcgagataagtttagttaatatagtgaaatttcgtttttattaataatataaaaattagttgggtatggtagtatgtgtttgtaattttagttattcgggaggttgaggtaggagaattgttcgaattcgggaggcggaggttgtagtgaatcgagagagatcgtgcggtgttattttattttagtttgggtaatagagcgaaattttattttaaaaaaatatataaaataaataaataaaaagaaagaattattgtattagtgatggaaatgtgtttttttttttttattttggtaattatttttttttttttttattataaaatattttaaattaaattaaaataattttatttatcgatagtttgaattttttttattattgttatatagttaattgagaggtatttcgaggaaaatataaatggtatagtaatgtattgtagattttaataatatatttgatattttaaattgtttttattggttttattttaaaaattatatgttttaaaattaagtagatattaaaagtataagatatattgggtttataaggtttaagttaattagggattgaaatataatttttaaatagagttggattatttagtaggtagattaagtatgtgtttaaggtattagtaaagtttgagtaatttattttttaaaacgtagtatatgtttttgataagtttaaaaagtagtagttataggaaaaattagaatttttatttttttgcgtttgttatattttttagtgttgtttaatttttttttgtaagtgagggtggtggagggtgtttataatttttttagggagtaagttttttttggttttttttttttttttttttttttttttttttgagattaagtttcgtttttgttttttaggttggagtgtaatggcgcgatttcggtttattgtaattttcgtttttttttgggtttaagcgatttttttatattagttttcgagtagttgggattataggtatgcgttattaagtttcgttaattttgtattttttagtagagatagggtttcgttatgttggttaggtttgtttcgaatttttggttttaggtgattcgtttgtttcggttttttagaatgttgggattatagacgtgagttatcgtattcggattttttttttatgtaatagtgataattttatttaaagtatttttttttttttttgagtcggagttttattttgttatttaggttggagggtggtggcgcgatttcggtttattgtaatttttgtttttcgggtttaagcgatttttttgttttagttttttgagtagttggaattatatacgtgcgttattatggttagttaatttttgtatttttagtagagacggggtgttattattttggttaagttggtttcgaatttttgattttaggtgatttgttcgtttcggttttttaaagtgttgggattataggtgtgagttatcgcgttttgttttaaagtattttttttttatgttttaaaataagattgtaagttagtttttaaagcggataatttaagagttaataggtattagtttaggatgtgtggtattgtttttaaggtttatatgtattaatatattatttaaatttataataatttttataaagtagggggtatttatatttttttttttttttataattacgaaaaatgtaaggtatttttagtaggaaagagaaatgtgagaagtgtgaaggagataggatagtatttgaagttggtttttggattattgtgtaattttgtttttagaatattgagtattttttttggtttaggaattatgattttgagaatggagttcgtttttttaatgattttttttttatttttttatttgtttataggtagaattttttttcgttcgtattaaataaattttatttttttagagtttgtttttatattaggtaatgtatacgtttgagaaatttttgttttagatagtcgttttatacgtaggaggggaaggggaggggaaggagagagtagttcgattttttaaaaggaattttttgaattagggtttttgatttagtgaatttcgcgtttttgaaaattaagggttgagggggtagggggatattttttagtcgtataggtgatttcgattttcggtggggtttttataattaggaaagaatagttttgtttttttttatgattaaaagaagaagttatattttttttatgatattaaatatttcgatttaatttggtagttaggaaggttgtatcgcggaggaaggaaacggggcgggggcggatttttttttaatagagtgaacgtatttaaatacgtttttgttggtaggcgggggagcgcggttgggagtagggaggtcggagggcggtgtggggggtaggtggggaggagtttagttttttttttttgttaacgttggttttggcgagggttgttttcggttggtgttttcgggggagatttaatttggggcgattttaggggtgttatattcgttaagtgttcggagttaatagtatttttttcgagtattcgtttacggcgtttttttgtttggaaagatatcgcggtttttttagaggatttgagggatagggtcggagggggttttttcgttagtatcggaggaagaaagaggaggggttggttggttattagagggtggggcggatcgcgtgcgttcggcggttgcggagagggggagagtaggtagcgggcggcggggagtagtatggagtcggcggcggggagtagtatggagttttcggttgattggttggttacggtcgcggttcggggtcgggtagaggaggtgcgggcgttgttggaggcgggggcgttgtttaacgtatcgaatagttacggtcggaggtcgatttaggtgggtagagggtttgtagcgggagtaggggatggcgggcgattttggaggacgaagtttgtaggggaattggaattaggtagcgtttcgatttttcggaaaaaggggaggttttttggggagtttttagaaggggtttgtaattatagatttttttttggcgacgttttgggggtttgggaagttaaggaagaggaatgaggagttacgcgcgtatagatttttcgaatgttgagaagatttgaaggggggaatatatttgtattagatggaagtatgttttttattagatataaaatttacgaacgtttgggataaaaagggagttttaaagaaatgtaagatgtgttgggattatttagtttttaatttatagatatttggatggagtttattttttttattaggagggattattagtggaaatttgtggtgtatgttggaataaatatcgaatataaattttgatcgaaattatttagaagcggtcgggcgcggtgttttacgttttgtaatttttttattttgggagattaaggcggggggaattatttgaggtcgggagttcgagattagtttggttaataggtgaaatttcgtttttattaaaaatataaaaagtagtcgggggtggtggtaggcgtttgtaattttagttattcgggaggttgaggtaggagaatcgtttgaattcgggaggttgaggttgtagtgaatagcgagatggagttattttattttagtttgggtgatagagtgagattttgtcgaaagaaagaaagagagaaagagagagagaaaaattatttagaagtaattatatattgtgtttatttttaattgagtagggtaaataaatatatgtttgttgtaggaatttaggaaataatgagttatatttatgtgattattttagaggtaatatgtagttattattttgggaatatttgttaatatttttgtttttttattatttttagtttatttgatatagtttatttgtgataagagtttttaattttttatttttgaatagaggtgttttttttttttttatttttgttttgtgagggagttaggggaggatttaaaagtaattaatatatgggtaatttagtatttttaaaattttgttaatagtttgaattcgggagtttggttttgtagttttataatattttagaagagattttatttgtttaaaaataaaaaggaaaaagaaaagtggatagttttgataatttttaatggagaagggagaagaatatgtagaaaaggggaaatgatgttggtttagaattttaattatattggtgtttaatataggaatatttatttatataatattttaaagtattaaatttatattagtatattattaaatggatatattattaaatgggtttaagtattttatatattttaatttaattgatttattttttttttgttttggatttttattatgatttaaatatttatatatgggttattttttagattttttatattatgaaatataagaaaaatttttaaggttagttttatgattaagacgaaggattttattgaatatataaaataataaatatattgtaatattttgtttttttttttgtagttgtaatttggtttgtttatattttttttttgtttttttgaaaattgagttagttttatttttttaggataggatttaataattataatataatttagtataattttttgatttaggtaaattatgtaatttgtgtttagtatgaaatgtatttaaaaataagtaatttttttttaatattattatttttaaattaatataataaataatagttattttaaaataaattgtttatttttattatgtagtatttaaattttaaggttgttatgattgtagatagtattttaaaatttttttttggaaatggttttgtttttaagatgatttaggaattaaagaggtgattattttttgtttaatgaatttttaaattataaatttgggaagtgttttagttttttattgttgttgttataaattattataaatgtgttagttaaaataaatataaaattattattttatagttttagagattagaagttaaaaatgggtttataaggttttattttttttggaaattttaaggggtaatttgtttttttgttttttttagtttttagtgattattaaattttttggtttatggtttttgtattttttttgtggtttgtgtttttatttttgtattttttttttgattgtgattttttaataaaaatatttggggttatgttgggtttattttgaaaattttggataattttttttaagattattaattaaattatatttgtaaagttttttttgttatataagttaatgtattaaaagtttttgaggattaggatatagatattgggggtgggggggtattatttagtttattataggaaggaattttagggttaattaaattagtttttttattttatatttgaagaaattgaagttttggaattggagagtattatgttaaatgaaataagttaaatatagaaagataaatattatatgtttttatttatttgtgaaatataaaataattatatttttagtagtaaagagtagaatggtggttattagagttggggggtgggaggaatggggagatggtaattaagatataaagttttagttaagatgggaggaataagtttgattgttttttttgagatgtgttttatagtatgatgaatatagttaaatagtaaattttaaatgtttttatttgataaaaatgttaaatatttgagatgatggataggttatttagtttgatttaataattttttattgtgtttaaagattataattttatattgtattatataaatatatataattgtattattttaatatataattttaaaattaatataatgaaaaagaaattgaagtttaatatttttagaagttaagtgtaatttaaaagttttgtgagaatttgttttaataaataaataagttttttttttttaataattattatattttgcgtttggatatatagtagtgaataaaaaaaaaaaaaaaaaaaaaaatttttaggtttaatataattttaggaagaaattttagtagttgtattttaggggaaatataggaagttagtttggagtaaaagttagtttgtttttgtttttttgttattttgttcgtgttttatagtgttttttgtttgtgacgatagtttcgtagaagttcggaggatataatggaatttattgtgtattgaagaatggatagagaatttaagaaggaaattggaaattggaagtaaatgtaggggtaattagatatttggggtttgtgtgggggtttgtttggcggtgagggggttttatataagtttttttttcgttatgtcggtttttattttggttttgattattttgttttttttggtagg

SEQ ID NO: 96 - DNA, 8666 bp, Artificial Sequence
  chemically treated genomic DNA (Homo sapiens)
tttgttagagagaatagaatggttagagttagggtgggggtcggtatgacggaaaggaagtttgtgtagagtttttttatcgttaagtagatttttatataagttttaggtgtttaattatttttatatttgtttttagtttttaattttttttttgagttttttatttattttttagtatataatgaattttattatatttttcgaatttttgcggagttgtcgttataggtagagagtattgtgaggtacgggtaaaatagtaaaggggtagggatagattgatttttattttaggttaattttttgtattttttttgagatataattattgaaatttttttttgaaattatgttaggtttggagatttttttttttttttttttttttgtttattgttgtatatttaagcgtagaatgtggtaattgttaaaaagagaaaatttgtttgtttgttaaaataaatttttataaaatttttaagttatatttagtttttgggaatgttgaattttaattttttttttattatattagttttaaaattatatattgggatagtatagttgtatatatttatgtggtataatatgaagttatgatttttgaatataatggggaattattaagttaagttaagtaatttatttattattttaaatatttgatatttttgttaaatgagagtatttgggatttattatttagttatatttattatgttatgaaatatattttaaaaaaaataattaaatttattttttttattttaattgaggttttatattttgattattatttttttattttttttattttttagttttagtaattattattttattttttattgttaagaatgtaattgttttatattttatagataagtgagaatatgtgatatttgtttttttgtgtttggtttattttatttagtataatgttttttaattttaaaattttaatttttttaagtataaaataagaaggttagtttaattaattttaaaatttttttttgtggtaggttgaataatgtttttttatttttaatgtttatgttttaatttttaaaaatttttaatatattaatttatgtggtaaaagaggttttgtagatgtgatttaattaatggttttgagggagattatttagaatttttagggtgggtttaatataattttaagtgtttttattagagggttatagttagagagaagatataagaatggaagtataggttatagagaaaatatagagattatgagttaaggaatttgatggttattagaagttggaaaagataaggaaatagattgttttttagagtttttaaaaggaatgaaattttgtggatttatttttgatttttgatttttagaattgtaaaataataattttgtgtttgttttagttaatatatttgtgataatttgtaatagtagtagtaggaaattaaaatattttttaggtttatgatttgagagtttattaaataagagatggttatttttttggtttttaaattattttggaaataaagttatttttagagaggaattttaaaatattgtttgtagttatagtaattttaaaatttgagtgttgtatggtggaagtagataatttattttaggataattgttatttgttatattagtttgaggatggtggtgttaaagaggagttatttatttttaggtatattttatattaaatataaattgtataatttgtttaaattaaggaattatattaaattatattatggttattaaattttgttttgagaaagtgaaattgatttagtttttaaagagataaagagaaagtataagtaaattaaattgtagttataaaaagaaagataaaatgttgtagtatatttattgttttgtgtatttaatgaagtttttcgttttggttataaaattagttttaaaggttttttttatattttatagtatgaaaaatttaaaaagtaatttatatgtaaatatttaaattatgatagaaatttaaagtaaaaagaaaatgaattaattgaattaaaatgtgtaggatgtttaaatttatttgataatatatttatttgataatatattaatatgaatttagtattttaaaatgttatataaataaatgtttttatattaaatattaatgtagttaggattttaagttaatattatttttttttttttatatgttttttttttttttttattaaaaattgttaaaattatttattttttttttttttttttgtttttaaataaataaggttttttttaagatattgtaggattataaagttaaattttcgggtttaagttgttggtaaaattttagagatgttaagttatttatgtattaattatttttaaatttttttttaatttttttataaaataggagtagggagaggagaaatatttttgtttaaaaatgaggaattgaaaatttttattataaataaattatattaagtaagttaaagatagtaaaagagtaaaaatgttagtagatatttttaaaatggtaattatatattatttttggaatgattatatgaatgtggtttattattttttaagtttttatagtaaatatatatttatttgttttatttagttaaaaataaatataatatgtagttgtttttgaataatttttttttttttttttttttttttttttttttcgataaagttttattttgttatttaggttggagtgaagtggttttatttcgttgtttattataattttagtttttcgggtttaagcgatttttttgttttaatttttcgagtagttgggattataggcgtttgttattattttcggttattttttgtatttttagtagaggcgaggttttatttgttggttaggttggtttcgaattttcgattttaggtgatttttttcgttttgattttttaaagtgaagggattataaggcgtgaggtatcgcgttcggtcgtttttgaataatttcgattaaaatttatattcgatatttattttaatatatattatagatttttattgataattttttttagtaagaaagataagttttatttaggtatttgtgaattggaggttaagtagttttagtatattttatatttttttaagattttttttttattttaaacgttcgtaaattttgtatttgataaagagtatatttttatttaatataaatatgtttttttttttagatttttttagtattcgagagatttgtacgcgcgtggttttttattttttttttttggttttttaagtttttagggcgtcgttaggaggaggtttgtgattataaattttttttgaaaattttttaggaagtttttttttttttcggagaatcgaagcgttatttgattttaatttttttgtaaatttcgttttttagagtcgttcgttattttttgttttcgttgtagattttttatttatttggatcggttttcgatcgtaattattcggtgcgttgggtagcgttttcgtttttagtagcgttcgtattttttttattcgatttcgggtcgcggtcgtggttagttagttagtcgaaggttttatgttgtttttcgtcgtcggttttatgttgtttttcgtcgttcgttgtttgtttttttttttttcgtagtcgtcgagcgtacgcggttcgttttattttttggtgattagttagtttttttttttttttttttcggtgttggcggaagagtttttttcgattttgttttttaaattttttggagggatcgcggtatttttttaggtaaggggacgtcgtgagcgagtgttcggaggaggtgttattaatttcgagtatttagcgaatgtggtatttttgaagtcgttttaggttgggtttttttcgggggtattagtcggaagtagttttcgttagagttagcgttggtaaggaaggaggattgggtttttttttatttgttttttatatcgtttttcggtttttttgtttttagtcgcgttttttcgtttgttagtaaaggcgtgtttgagtgcgtttattttgttaaaaagaaattcgttttcgtttcgtttttttttttcgcgatataatttttttaattgttaaattgaatcggggtgtttggtgttatagggaaagtatggtttttttttttaattataagaaaaagtaaaattatttttttttagttgtgagagttttatcgagaatcgaaattatttgtacgattagaaagtgtttttttatttttttaatttttgatttttaggagcgcggggtttattaagttagaaattttagtttaaaggattttttttggagagtcggattgtttttttttttttttttttttttttttttgcgtgtaaaacggttgtttggggtaagggttttttagacgtgtatattgtttggtataagagtagattttgaaaagatgaggtttatttaatacggacgggggagaattttgtttgtaggtagataggaaaatggggagggagttattggaaggacggattttatttttaaagttataatttttagattagaaaaagtgtttagtgttttagaagtagagttgtatagtgatttaaagattagttttaaatattgttttgttttttttatattttttatattttttttttttattgaaaatattttgtatttttcgtaattataaagggggaagggaatatgagtgttttttgttttataggggttgttgtgagtttaaatgatgtattaatatatataagttttaagaatagtgttatatattttaagttaatatttgttagtttttgaattattcgttttgaggattggtttgtaattttgttttgaggtatagaaagaaaatgttttggagtaggacgcggtggtttatatttgtaattttagtattttgggaagtcgaggcgggtagattatttgaggttaggagttcgaggttagtttggttaaaatggtgatatttcgtttttattaaaaatataaaaattagttggttatggtggcgtacgtgtgtaattttagttatttaggaggttgaggtaggagaatcgtttgaattcgggaggtagaggttgtagtaagtcgagatcgcgttattattttttagtttgggtgatagaatgagatttcgatttaaaaaaaaaaaaaaatgttttggatagaattattattattatataaaaggaaagttcggatgcggtggtttacgtttataattttagtattttgggaggtcgagataggcggattatttgaggttaggagttcgagataagtttgattaatatggcgaaattttgtttttattaaaaaatataaaattagcggggtttggtggcgtatgtttgtaattttagttattcggaggttgatgtaggagaatcgtttgaatttaggagaaggcggaggttgtagtgagtcgagatcgcgttattgtattttagtttgggagataagagcgaaatttggttttaagaaaaaaagaaagaaagaaagaaagaaagattaagaagaatttattttttgaaaagattatgggtattttttattatttttatttataaagaaaagttaaatagtattaaagagtataataagcgtaaggaggtaaaagttttaattttttttgtgattattattttttaagtttattaaaaatatgtattacgttttaaaaaatggattgtttagattttgttgatgttttaagtatatgtttaatttgtttattggataatttagttttgtttaaaagttatattttaatttttggttgatttaaattttgtagatttagtatattttgtatttttagtgtttgtttgattttaaaatatgtagtttttaaaatgaagttaatgaaaataatttgggatgttaagtatgttattaaaatttataatgtattattgtattatttatatttttttcggggtattttttaattagttgtgtagtaatgatagggaaaatttaaattatcgataaataaaattattttagtttagtttaagatattttatgatggaggaggaagaaagtggttgttaggatgggagggagggaatatatttttattattaatataatggttttttttttttgtttgtttgttttgtgtgtttttttgagatggagtttcgttttgttgtttaggttggagtgaaatggtatcgtacgatttttttcggtttattgtaattttcgtttttcgggttcgagtaatttttttgttttagtttttcgagtagttgggattataggtatatgttgttatatttagttaatttttgtattattagtagagacggggttttattatgttggttaggtttgtttcgaatttttgattttaggtgatttatttattttagttttttaaagtgttgggattataggtatgagttatcgtgttcggtttatagtggtttttaatgggggtgggagagtgggaagagtaggtttttttaagagtttgttgaaataaatattttttttttaaaaaagaaagtaggtaatgattttttttaaaaaagatgtgtttatttgtatatgtatttttagataaaatttttagtgaatttagggatttttttgaaattttattatggatttttatattaagaatttttttagtttttgtgaaaaatatatatagttattggtgaagaagatgggagatgtaattatataaaaataatatttggatgtattataaataggtgtaaaagttgattgttttggaaatattaagaataagttttagatatgtatattttatattttgtagtagagttttggaaggattatggtatttttgggtggggttattttgttttagaaattgaagtttattatttattataaattttatgtaggggggaggggggagggatagtattaggagatatatttaatgttaaatgatgagttgatgggtgtagtatattaatatggtatatgtatatatatgtaataaatttgtatattgtgtatatgtattttaaaatttaaagtataaataataataaaattaaaaaaatattatgtaaataattaataatagtgggaaaatttttttagtttttttgttaaagagtttattatatttttagtttatttatatatatcgatttgaggtgtaaaattttagaagaatgaaaatataaagttttggatttttgtgttttttatgttagttttagattttttatgtgtaaaatgggattataatatattttatgtggttataaaatatgataatgtatgtttaaaagtttttaatgtaaaaatttattatatttattaaatttattaaagtttgttggttattgttattattatttttatatttatttttttttttttttgagaatgttattttttttttagatttgtattgtttttgtagttttgaaaattttatacgtgaaatttaaatttgttttaattttgattagttttataataaaaaaagattattatttgtttatttatttaataagtttagaaattaagggtagatatggggtgggggtagaggggagtaggttaaatatagtatttttatagttagattgttagggtttaaattttaattgttttatttattggttttttaatttttattaaagttatttaatatgtttgggtttttgtttttttatttgtatgattaggataataattgtatttgttttaaatagttgtttagggattaaatgaagtatgtaatgtttttagaagagtaaaataaagtatagaatgatataagaaaatgaaaaggtgattaaatttatttttatttgtttttagtaggtaaaggttttcggatgttgagagttgattttagttttgaagaatgatgtgagagtttaaagatggaaaagaaggagaaagatattttaggtagaggtaagaggatgtgtaaaggtatagaagtttaggaaaattgaaagtaatttatttagatttatttttgaaaattagtttgtgaaggattttttagagagttaaaagaaaaattaggataatgggatggtaaggaagtggggatattgcgttgattatttttttatagtttggttgtgatagtttaaggttttatgttatgaagtgaggtagatggaaggtggaggagatttgagtatatatatatttggaagggtaagtgttaagtgaagagaagggaaagttagaaaagaataaaagaaaagttaagtatataggtaagataggatatttttgaggatttgaggttttttaaaaataatgaagaaatagaatttaaagtatagcggtggttatagattttgttataagagatatatagatttgggagggagaaaaggttagaacggggaggaagttgaggtatttttttttatgaatgaggaggttagtttgtttgtagagtgaaaataagatggtcggttaggaagtttgagaatcgtaaaggtttggaatattttttatgagtagagaggatgggttgagtaagatttagatagagaagttttttgttttgttttttaaaattagattggagaatttagttgagggtggagattatgatatagtagggatatttgattattttttttaaattaaagaaagttttgtag

SEQ ID NO: 97 - DNA, 7309 bp, Artificial Sequence
  chemically treated genomic DNA (Homo sapiens)
atgcgattaatggtgttaattgttttttggattgtttttatagtataggataagattatattagttttagtaggttttattgaagaaagtttatgtgttttgtagaaataagatttttagtttagtttaataggagattaattatatgtttattttatttttttttaaggtatgatagtatttggttgagatgtttgtgtgtattttttgtgtgaagttgagtatgtaatttttaaagaaattataaaggagttattcgtttttaaaggaaaaatatatgaattttacgggtataaggaagatattaaaatagggttggggagaagtttttttttttttattttatagtattttttatagaaataattgattgtttgaatatatggttattgaaatatatatatatatatatatatgtatatgaaaataagagttggaatatttgattttgttttttattttttattattttagataatataggatataatatggttttattgtatatatgtgttttttggtttaaaaatattgagagtagatttttgtggaaagaaatatgaaaatttgaggatttatgcgaatgtagttagaggcgaatgtagttagaggggtttttaatttgttggtagagttgggggagagttggggtaattttattgttatgaaattggttttagatggaggtaaggaaaggtgtttattttttgttggtgttagatatagagagattttgtagtatttcgtattttaggtttagaattgtttagtgttgggtagtagttttattgagggtttggttagagtttatggggatgggtggattaggttgtttgttgtttggaaaaggttattttgaatataatgatttttatatggacggtggggtttgggggaaggtatcgtggttagggtttggaggggaagagggaggaaagtaaagaggagtttttttatgaggtaatagaaatgatagtattttttttaggttgaatttttaaaatttagttttgttttggaagattgggattgtggtattttttgtagtgtttttagatcgttttaaggtttttaaattaatgatttataattatgttgtttttttagagagtatttttttttttggttgatatgtggttagtttaggggtggaggagtttcggtagttacgaatttagacgggatgttgattgagagttttgtggttatggtagatgggaggggtgagttttatttatttaaaggtattcgtattttatcgatgagtgtggaattgtgttttttcgttttcgtagtgagacgatcgattaggattgtaggttgagtaaatgggtgttttttggtttatagcgttttttagtattagttagcgggatagagtttcgtgaattttttaaggagttattatttgtttgtttgaatgttggaaaggggtcggtggtgttgattattggatttatttaattaatatttattaaattcgttgttattaatatttaatttttgtgttttaggggtttagattttagtaagggaaatagatgggtaaataattatattagagttagttaagtattgttaaagaagttgatatagggtgttgtggggatatatgggaggggaattagaggaggtttttcggaggaggtgatatttaagttgaggtttgaaggatgtggaagagtttagtaatttttgaagattaaaaaaatggtgataaaaaagatatttttttaattttttagtgttacgatttaagagataaataagtaggtgaacgtataattatattgggttttattataagttagagtttgttttttttaggattttggtattataattttttttgaaattttgttttcggtattgatttttgggggaggtagtaatataggaatttagtgttcgttgcgaaattgatggatggtttttagttttgggtacgtttttatgtgttaaatttgtttaaatggtaggatttattttttttttagaagtatttatttgttttataggattttttatggaattttggagtttttgaggcgagagggattttggatattattgagttttattttttatttaataaatatagaagtggacgtttggataggtaaagtgatttgattaaggtaggtgtatagttattttgtaatattgggaataaattttaggttttttgattttttgtttttattttattttttttttattttttagaaataaagtttttatgtgtttttttttatagtgatatgtttggaatgtattagttagtaatttaggaagggaaaaaaataaatatataagagataaatttgttaggaggataaatttgtattgtttttgattggtttagagggtgattattattatggtagagaattatttaattagtgtaagtaaaatttttttgtgggttgggtattgtataaagatttaaacgaatttgtttatagatttgaaaagtagatacgagatttgtgaatggttggggtttttaagtttatagtataagtatgggttatattttatagtttggaggattgagttttgaaaatgggtaagtttttttatttttttgaattttattttttttatatttaaaataaggatgagtagtttttgaggttttttttacgatttttttttttatagattttagtattttataatttgatataaagagggtggatatgaatttattttttttagaaaagttttaggaaagagaatattaggttattttagtaggtgtgtagataggttagatagattttgaaatttatttagttttttttagatgtataattttattattgtttttagttgttaagagaaagtaggagagtttgtatttttattttttttttttttttttttttttttggagacggagttttattttattatttaggttagagtgtagtggtatgattttagtttattgtaagtttcgttttttaggtttacgttatttttttgttttagttttttaagtaattgggattataggcgtttattattatatttggttaattttttgtgttgttagtatagacggggttttattatgttagttaggatggtttcgattttttgatttcgtgattcgtttattttggttttttaaagtgttgggattataggcgtgagttatcgtatttagtttgtatttttatttttattgttagttttaggtttattttatttagtttattaagtgatgttgaataattaatttttatatattattaggtttatggatattatgatatttagattgatgggtgtttgttgaagggggtgattttagtaggaggatttttttacgtaaggatttatggagtttgttgttttttttttttagggtgagaattaaattgtttttatacggtgggtagaggggaattgatttaggtttggaataagagagaatattttaattgaaaagtttttggaattcgttgaattttaagatattgtgtggattagtttaggatagggagtgagaagaaattaattaaaaggtaatttcgttattttttagttggaaaaaagattagattatatttgtgtttttataattaagtagttgttggaaaaaaacgttttagatgttttttatgagaaaattgttgtttgaagtttagtagaagttatttatttgatatttatattttaggtaaggtttttcgttggagaaaatatcggtattttggataaaattgaaatgtgaaaagaaagggaagagagggtttttattatgtaagatgtttatttaaagtggatttggtttggaaagttttttaaaattttttatatgattgtggaataagttatgtggggcgcggggataagcgaattttttaaattttattacgtatgtttttatttaatttggatttttagagtggtttttagggtattttgtttaggatttagttagttgttggttatatttatgttttttagttttttgagattttatttggttttgagagggttaaaaagtagtgtggttaaatattttaggttttaaagtatttttattgtggttggggaagtaatagaattatattttataaaataatgaaaatagtgttagaaaaatatcgagagatagaaatatttttacgagttaggttatagttagagtgaaggtagggaaggtttttaaagttgggtggaggggataagttaaaaagatgtggaaattggttttttttttttatggttaaagtgtttaaaggggaaaaaggagttttaaaaatgtttttggaaatattattttttacgaatttttcggtttttgttgttttaatgttatttgtttgagatgtaaatagaggagttttgagaaagaagttgaatttgtatttttttttgtttttatttgttttaaatttgtggtatttttaataggatgaagcggaagagaaagggaaagagataaaagtgtagaaagatggaagattttagttgtaaatggttatttgtagttagatggaatagttgttgacgtttagggaaatgtatgtttttttttagatgggaaggagtagtggaaaggggtgacgagtttttggttggttattaattattttatttttttgtgtcggttttttatttggaaagtgggagtgatatttgtgtttgttttttttatttataaagattattgtgagagttataatacggtgagatatagaattttgtttttaaaaatataaagtagaattaagatgttaataataaggatagtaattgtgttagttatttgtaattatttattatagttagtcgtttaggattttggatcgtttttttggttttattatagttttggattagtttatttttaaattttttgttgaagggtggagttttgttagttatgggtagggaattatttttttttgtttttttattttttgttttttaaatatgtttagggtttttgtatttgttgttttttttgtttggtattttttttttgtggtttgttttagagttgatttttgtttttgtttattttttagcgaggatggtattttagggagttttttttttattatcgtagagagagtaggttttttttagttatgtttaatttagaattttgttttgttttttttatagttttagtattatagaaaattattttgtgtatttatggatgtttacgggggtaagggttttgtgttgtttaatttagtattttgaatcgtgtttgttgaatgaatatagaatttcgtttgttttgggagagtatagaaaatagttttttattatatattatagttagttgtaaatagtagatggttttttatattttagagagtaagaattagagagagagagaaagagagagagtttgggttttttttttttgtgtttgttttttttagagaaattggaggggtagtagttagtattttttcgttggttttattaagtatagttaaggtttttaggatatggttattttttatttgtggaagcggttttgttggggtgggtgggtgttagttggttttggtttgggttagagatatttagtggtttaggtgggcgtggggttagggcgtagacgagaaggggtacgagggtttcgtttcgaggatttagcggtaagtatcggtttcgggcgcgttttagtttatttattcgcgtgtttacggcggtattattttttataaggatttgaacgattcgggggcggtttcgtttcgttattttttgttttcggtttcgttttttttttggagggtcgatgaggtaatgcggttttgttattggtttgagggggcgggttttaatagttcgaggcggggttttcgggggtttagcgttatattattcggtcgtttaggtagcggcgtagagcgggtagtaggtaggcggcgggcgtttagacggtttttttttttttttttgtttttttagtttttgttttttcgtcgggaggtcgttcgtcgagttttgcgttagcgtcgaggtagtttcgttgcgttttatttcgtttcgtcgggtattcggagggtagcgcgtcggaggttaaggttgtttcgtacggttcggcgggcgagcgagttcgggttgtagtagtttcgtcggcggcgcgtacggtaattttggagaggcgagtagtagtttcggtagcggcggtagtagcggtaatgattttttggttcgggtttatcgtgtttttgggtagttggagtttgggggattggggcgtcgaggcgtgtatatgttcgtttagttatttttaggacgttttttgtaatttcgatatcggtaagcgtttttggtgtttcgttcgagttttacgttgtagttaggattgtagcgttgtttagggaggtagggcgagttttattttttttttttgttttaggagaggggtagacggggttggggcggagtggagaaattcgatgtttttgggcgggggcgttggtatagttgagaggggaagatgttttgtagaggaaatttatagtggttgagggagtttttggtcgtttttgtttttttaatttaggtcgtgaggtttttatcggtttttttgatatttggaaaatgtttttatttattattaacggaggaagggttagaagagaagggtggggaaagggtttttaaaatttggaatgttaattaaagtgttgggaaattgaatagttaaaaaaaaaaaaaaaagttgttcgttatgtgtacggaaagttgtaggagaaatttggagtatttcgagtttgtattattttttgcgtttatgaaatttattttttttattgagatttaatttagttgtaggttttttaggtaagcgttaatcgagtttttgggattgttaagtttgggtggatttaagggggaaaatgaggagaaagttgtggtattgatttacgttttggaggtattgtgtttgagagtgttgatagttagtagaaggtgcgaggggttatttattatatagttgtgaaaatttataggaaggttattttttttttttttgaatgtgtgtggggagggggagaatgggtagtggaaaatagatttgttattaaaagaataaatttgttaagggttatattacggtgatagttttagattggatttagtgttttgagtagagagattttgtaaagagattttttattttttagtgtgtatggagggtttcgagagtattttgggaggtttgtttgggagtgtttgggatatttgtgtttggatggttaaaggtggagtggtatttgggaaatatttttttttttttttttagtttataaag

SEQ ID NO: 98 - DNA, 7309 bp, Artificial Sequence
  chemically treated genomic DNA (Homo sapiens)
ttttatgggttggaaaggaggagagagatgttttttagatgttattttatttttagttatttaaatataagtgttttaaatatttttagataagttttttaggatgttttcggggttttttatatatattaaggagtaggaggtttttttatagggtttttttatttaagatattaagtttagtttggaattgttatcgtgatgtgatttttggtaggtttgtttttttggtgataaatttgttttttattatttattttttttttttttatatatatttaagggggaaaaaaatagtttttttgtgaatttttatagttatgtggtgagtgatttttcgtattttttgttggttattaatatttttaaatatagtgtttttagggcgtgggttaatgttatagttttttttttatttttttttttaaatttatttaaatttggtagttttagaagttcggttagcgtttgtttgggaagtttgtagttgggttgggttttagtgaaaagaatgaattttataggcgtaggagatgatgtagattcggagtattttaagttttttttgtaatttttcgtgtatatggcgggtaatttttttttttttttttaattatttaattttttagtattttagttagtattttaagttttgggaattttttttttattttttttttttagtttttttttcgttagtagtgaatggggatattttttagatgttaaaaggatcggtaggaattttacgatttaagttaggaaagtaaaggcggttaggggtttttttagttattgtgagttttttttgtagggtattttttttttttagttatgttagcgttttcgtttaaggatatcgagtttttttatttcgttttaatttcgtttgttttttttttggggtagaggaaaggagtggggttcgttttgtttttttaagtagcgttgtagttttggttgtagcgtggggttcgggcggggtattaggagcgtttatcgatgtcggagttgtagaaggcgttttgggggtggttgggcgagtatgtgtacgtttcggcgttttagttttttaggttttagttgtttaggagtacgatgagttcgagttaaggggttattgtcgttgttgtcgtcgttgtcggggttgttgttcgtttttttaaagttgtcgtgcgcgtcgtcggcggggttgttgtagttcgagttcgttcgttcgtcgggtcgtgcggggtaattttggttttcggcgcgttgtttttcgagtgttcggcgggacgggatggggcgtagcgaggttgtttcggcgttggcgtaggattcggcgggcggtttttcggcgaaggagtaggagttggaggagtaagaggaggaggagaagtcgtttgagcgttcgtcgtttgtttgttgttcgttttgcgtcgttgtttgggcggtcgagtgatatagcgttgggttttcggggatttcgtttcgggttgttggggttcgtttttttagattaatggtagagtcgtattattttatcggttttttaaaaagggggcggggtcgggggtaaggggtaacggggcggggtcgttttcggatcgtttagatttttatagggaataatgtcgtcgtgggtacgcgagtgggtgggttggggcgcgttcgggatcggtgtttgtcgttgggttttcggagcggagttttcgtgttttttttcgtttgcgttttggttttacgtttatttgggttattgggtgtttttgatttaaattagaattaattaatatttatttattttagtaggatcgtttttataggtgaggggtggttatgttttagagattttgattgtgtttggtggaattagcgggggaatgttaattgttatttttttagtttttttggagagagtaggtatagaggagaaagatttaaattttttttttttttttttttttttggtttttattttttgggatatgggaagttatttgttgtttgtagttggttatgatatatgatagaagattgttttttgtgtttttttagagtaaacggggttttgtatttatttaataaatacggtttaggatgttgggttaagtaatataaagtttttgttttcgtggatatttatgaatgtatagggtgattttttgtgatgttagggttatgaagaaaataaaatagagttttgggttggatatgattggggagggtttgttttttttgcgatagtaagggaagggttttttgaagtgttattttcgttgagaagtggataaagataaggattagttttggggtaagttataggagagaggtattaggtagggggaatagtaagtgtaaagattttgggtatgtttgaaagatagaaagtagaaaggtaagaggaagtggttttttgtttatggttgatagagttttattttttagtaagggatttgggggtgagttgatttaaaattgtagtaaaattaggagaacgatttaggattttagacgattagttataatagatgattgtagataattaatataattattatttttattattgatattttgattttgttttgtatttttaaaagtaggattttgtattttatcgtattatagtttttataataatttttgtgggtaggaaaagtaagtataagtattatttttattttttagatgaggaatcggtatagaaagatgggatgattggtggttagttaggaattcgttatttttttttattgtttttttttatttgaagagagatatgtatttttttgaacgttagtagttgttttatttaattgtaaatggttatttgtagttgggattttttatttttttatatttttgtttttttttttttttttttcgttttattttgttagaaatgttataagtttggaataaatagaaatagggagaaatgtaagtttagttttttttttagaatttttttgtttatattttagataagtgatattgggatagtagaggtcgaagaattcgtgagagatggtatttttaagaatatttttgaaattttttttttttttttgagtattttagttataggaaagggaaattagtttttatatttttttgatttgttttttttatttagttttaaaaattttttttgtttttattttaattgtggtttaattcgtagagatgtttttgtttttcgatgtttttttagtattgtttttattgttttatggggtatgattttattgtttttttaattatagtaggaatattttgaggtttgggatatttagttatattgttttttagtttttttagaattaaatagggttttaggagattggagagtatgggtgtggttaatagttgattgagttttgagtagagtgttttggaggttattttaaggatttaggttgaatgagggtatacgtggtggaatttgagagattcgtttattttcgcgttttatatgatttattttatagttatgtggaaggttttagaagattttttagattaaatttattttggataagtattttatatgatagaggtttttttttttttttttttttatattttagttttgtttaaagtgtcgatattttttttaacggaaggttttgtttggaatataagtattaagtagataatttttgttgaattttaagtagtagtttttttatagaaagtatttgaagcgtttttttttagtagttatttaattatgaaagtataagtataatttgattttttttttagttgaaaagtaacgaaattattttttggttaatttttttttattttttattttaagttggtttatatagtgttttgaagtttagcgaattttaagagttttttagttgggatgtttttttttattttaaatttgagttagtttttttttgtttatcgtgtgaaggtagtttggtttttattttaaggaaaagaaatagtaaattttatgaatttttgcgtaggggagtttttttgttagggttattttttttagtaggtatttattagtttggatgttatggtgtttatgagtttaataatatgtaagaattggttatttaatattatttaataagttaggtggggtgaatttgaggttaatagtaagaatgaagatgtaggttgggtgcggtggtttacgtttgtaattttagtattttgagaggttaaggtgggcggattacgaggttaggagatcgagattattttggttaatatggtgaaatttcgtttgtattaataatataaaaaattagttaggtgtggtggtgggcgtttgtagttttagttatttgggaggttgaggtaggagaatggcgtgaatttgggaggcggagtttgtagtgagttgagattatgttattgtattttagtttaggtgatggagtgagatttcgtttttaaaaaaaaaaaaaaaaaaaaaaagaatgaagatgtaggtttttttgtttttttttgatagttaagaataatgatagagttatatatttgggaagaattgagtaagttttaagatttatttggtttgtttatatatttattaggatgatttggtatttttttttttggaatttttttaggaaaggtgagtttatatttattttttttgtattaagttataggatgttagagtttgtaggaagagaagtcgtaaaaaggattttagaaattatttatttttgttttaaatgtgggaaaaataaggtttagagaagtgaaggaatttgtttatttttagggtttagttttttaagttgtaaggtgtggtttatgtttgtattgtgggtttggaaattttagttatttatagatttcgtatttgttttttagatttgtagatagattcgtttgagtttttgtatagtgtttagtttatagagaaattttatttatattgattaaataattttttattatgataataattattttttgagttaattagaagtaatataggtttgtttttttgataggtttattttttgtgtgtttatttttttttttttttaaattattagttaatgtattttaaatatattattataaaaaaaagtatatgaaaattttgtttttgggaaatgaaaagagagtaaagtggaaataaaaaattaaaagatttgagatttgtttttaatgttgtagaatagttgtgtatttgttttggttaagttattttgtttgtttaggcgtttatttttgtgtttattggatgaaagatagaatttagtggtatttaggatttttttcgttttaaaaattttaagattttatggggaattttgtaggataagtgaatgtttttgaaggggagatgggttttgttatttaaataggtttgatatatgggaacgtatttaagattgaagattatttattagtttcgtaacgaatattgagtttttatattgttattttttttaagaattaatgtcgaaaatagaattttagagaagattgtgatgttaaagttttaggagagataggttttggtttatggtggagtttagtgtagttatgcgtttatttgtttgtttgttttttggatcgtagtattaaaaagttaggaaggtgttttttttattattatttttttggtttttaggagttattgaatttttttatattttttagattttagtttagatgttatttttttcgggaaattttttttgattttttttttatgtatttttataatattttgtattaatttttttgataatatttagttgattttaatgtgattatttatttatttgttttttttgttggagtttaagtttttagaatatagggattaagtgttggtaataacgagtttaataagtattggttgaatgggtttaatgattagtattatcgatttttttttagtatttagataggtaggtggtggttttttggagagtttacggagttttatttcgttggttggtgttagggggcgttataagttagagaatatttatttgtttagtttgtagttttggtcggtcgttttattgcgagggcgggagagtataattttatatttatcggtggggtgcgggtgtttttgagtgggtgaagtttattttttttatttgttatggttataaagtttttagttaatatttcgtttgggttcgtggttgtcggagtttttttatttttgagttggttatatgttaattaaagggggagatgttttttggggaagtaatatagttgtgaattattggtttgggggttttagggcggtttgggaatattgtagaggatgttatagttttagttttttagggtagagttgggttttggaaatttaatttggagaaggtattgttatttttgttgttttatagggaagtttttttttgtttttttttttttttttttttagattttagttacgatgtttttttttaagttttatcgtttatgtgaaagttattatatttaaaatggttttttttaagtaatagatagtttggtttatttatttttatgagttttggttagatttttagtggggttgttgtttagtattgggtaattttgagtttaagatgcgaggtattgtaggatttttttgtgtttggtattagtagggggtaaatatttttttttgtttttatttggagttaattttatggtagtaaaattgttttagtttttttttagttttgttagtaaattgaagatttttttggttatattcgtttttggttatattcgtatgaatttttaggtttttatatttttttttatagggatttatttttagtgtttttaagttagaaaatatatgtgtgtagtaaagttatgttgtattttgtgttatttagggtggtgggaaatggaaagtagagttaaatattttagtttttgtttttatgtgtatgtatgtgtgtgtatgtatgttttaatgattatatatttaagtagttaattatttttgtgaagggtattatgaaatggaaggagaagaatttttttttaattttgttttaatgttttttttatgttcgtggagtttatgtgttttttttttaaaaacgagtagtttttttgtggtttttttgaaggttgtatgtttagttttatatagagaatatatataagtattttagttaggtgttgttatgttttgggagggaatgggatggatatgtggttggttttttgttagattgggttggaggttttgtttttgtaaggtatatgagttttttttagtggaatttgttggaattgatatggttttgttttgtgttgtggggatagtttaaagagtagttaatattattgatcgtat

SEQ ID NO: 99 - DNA, 3715 bp, Artificial Sequence
  chemically treated genomic DNA (Homo sapiens)
gaatttcggcggagagaattttttgtttttttttattttttttttatttttttttgttttttttatttcgagtgcggagtagagattaaaagatgaaaaggtagttaggtttttagtagttaaaaaataaaataaataaaaataaaaaagtcgaaataaaagaaaaagataataatttagtttttatttgtatttattttagtggatattgaatttggaaggtggaggattttgttttttttttttaagatttgggtattttttgaatttattttttaagtattaagagatagattgtgagtttagtagggtagattttgtttatcgtgtgtttttttttgtacgagattttgaggttgttagagcgttttttgcgtggttgttttcgtaagtttttttttttggagtttttcgtaggtgggtagttagttgtagcgattatcgtattattatagtttgttgaatttttttgagtaagagaaggggaggcggggtaagggaagtaggtggaagatttagttaagtttaaggatggaagtgtagttagggttgggaagggtttattttcggtcgtcgtttaagatttatcgaggagttttttagaatttgttttagagcgtgcgcgaagtgatttagaattcgggttttaggtatttagaggtcgcgagcgtagtatttttcggcgttagtttgttgttgttgtagtagtagtagtagtagtagtagtagtagtagtagtagtagtagtagtaagagattagttttaggtagtagtagtagtagtagggtgaggatggttttttttaagtttatcgtagaggttttataggttatttggttttggatgaggaatagtaatttttatagtcgtagtcggttttggagtgttatttcgagagaggttgcgttttagagtttggagtcgtcgtggtcgttagtaaggggttgtcgtagtagttgttagtattttcggacgaggatgatttagttgttttatttacgttgtttttgttgggttttatttttttcggtttaagtagttgtttcgttgattttaaagatattttgagcgaggttagtattatgtaatttttttagtaatagtagtaggaagtagtattcgaaggtagtagtagcgggagagcgagggaggtttcgggggtttttattttttttaaggataattatttagggggtatttcgattatttttgataacgttaaggagttgtgtaaggtagtgtcggtgtttatgggtttgggtgtggaggcgttggagtatttgagtttaggggaatagtttcggggggattgtatgtacgttttatttttgggagttttattcgttgtgcgttttattttttgtgttttattggtcgaatgtaaaggttttttgttagacgatagcgtaggtaagagtattgaagatattgttgagtattttttttttaagggaggttatattaaagggttagaaggcgagagtttaggttgttttggtagcgttgtagtagggagtttcgggatatttgaattgtcgtttattttgtttttttataagttcggagtattggacgaggtagttgcgtattagagtcgcgattattataattttttattggttttggtcggatcgtcgtttttttcgtcgtttttttatttttacgttcgtattaagttggagaattcgttggattacggtagcgtttgggcggttgcggcggcgtagtgtcgttatggggatttggcgagtttgtatggcgcgggtgtagcgggattcggttttgggttatttttagtcgtcgtttttttattttggtatattttttttatagtcgaagaaggttagttgtatggatcgtgtggtggtggtgggggtggtggtggcggcggcggcggcggcggcggcggcggcggcggcggcggcggcggcggcggcggcggcgaggcggaagttgtagttttttacggttatattcggtttttttaggggttggcgggttaggaaagcgattttatcgtatttgatgtgtggtattttggcggtatggtgagtagagtgttttattttagttttatttgtgttaaaagcgaaatgggtttttggatggatagttatttcggattttacggggatatgcgtttggagattgttagggattatgttttgtttattgattattattttttattttagaagatttgtttgatttgtggagatgaagtttttgggtgttattatggagtttttatatgtggaagttgtaaggttttttttaaaagagtcgttgaagggaaatagaagtatttgtgcgttagtagaaatgattgtattattgataaatttcgaaggaaaaattgtttattttgtcgttttcggaaatgttatgaagtagggatgattttgggagttcggaagttgaagaaatttggtaatttgaaattataggaggaaggagaggtttttagtattattagttttattgaggagataatttagaagttgatagtgttatatattgaaggttatgaatgttagtttatttttttgaatgttttggaagttattgagttaggtgtagtgtgtgttggatacgataataattagttcgatttttttgtagttttgttttttagttttaatgaattgggagagagatagtttgtatacgtggttaagtgggttaaggttttgtttggttttcgtaatttatacgtggacgattagatggttgttatttagtatttttggatggggtttatggtgtttgttatgggttggcgattttttattaatgttaattttaggatgttttatttcgtttttgatttggtttttaatgagtatcgtatgtataagtttcggatgtatagttagtgtgttcgaatgaggtattttttttaagagtttggatggttttaaattattttttaggaatttttgtgtatgaaagtattgttattttttagtattattttagtggatgggttgaaaaattaaaaattttttgatgaatttcgaatgaattatattaaggaattcgatcgtattattgtatgtaaaagaaaaaattttatattttgtttaagacgtttttattagtttattaagtttttggatttcgtgtagtttattgcgagagagttgtattagtttatttttgatttgttaattaagttatatatggtgagcgtggatttttcggaaatgatggtagagattatttttgtgtaagtgtttaagattttttttgggaaagttaagtttatttatttttatatttagtgaagtattggaaattttatttttttattttagtttatgtttttttttagatgttttttgtttgttataattttgtattatttttttgtagtgttttgtttaattttttttattgatgtatagtttgttatggaattttatttgttgggtttttttttttttttttttttttttttttttttttttttttttttatttaatttttttatggtatttttagattttgttttttattgtggtttttatttgtgttttgaatggtgttgtatgtttttaaatttgtgatgatttttatatggtttagtgttaagttgtgtttgtttatagtattattttgtgttagttatataaacgtttatttattttatgttacgggaagtttagagagttaagattatttggggaaattaaaataaaaatattcgaattt

SEQ ID NO: 100 - DNA, 3715 bp, Artificial Sequence
  chemically treated genomic DNA (Homo sapiens)
gaattcgggtgtttttgttttgatttttttagataattttagttttttaaatttttcgtggtataagataagtaaacgtttgtgtggttggtatagagtagtgttgtaaataagtataatttgatattgggttatatgaggattattatagatttaaaggtatataatattatttaaaatatagataggagttataatgggaagtaaagtttgaaggtgttatgggagggttagatagggagggaagaagaaaaagaaaggagagaaagagaaaaaaaaagtttagtaaatagaattttatgatagattgtatattaatagaggaaattaaataaggtattgtagaggagtagtgtagagttataataggtagaagatatttgaaagggggtatgagttggggtggggaaatagggtttttaatgttttattgggtgtggaaatagatgggtttgatttttttagaaaggattttgggtatttgtatagagatgatttttgttattattttcggaaagtttacgtttattatgtgtgatttgattagtaggttaaaagtgaattgatgtagttttttcgtaataggttgtacggagtttaggagtttggtgagttggtagaagcgttttgagtaggatgtgggatttttttttttgtatgtaatgatacgatcgagttttttgatgtagtttattcgaagtttattaaagaatttttgattttttagtttatttattggaataatgttgaagagtagtagtgtttttatgtataggaatttttggggggtgatttggagttatttaaatttttgagagaggtgttttattcggatatattggttgtatattcgggatttgtgtatgcggtatttattgaaaattagattaggggcgaagtagagtattttggagttgatattggtgaaggatcgttagtttatggtaaatattatgagttttatttaggagtattgaatgatagttatttggtcgtttacgtgtaagttgcggaagttaggtaaggttttggtttatttgattacgtgtataagttgttttttttttagtttattgaggttagagagtaaggttgtaaaggagtcgggttggttgttgtcgtgtttagtatatattatatttggtttaatggtttttaggatatttagaaagatgggttgatatttatagtttttaatgtgtgatattgttagtttttgggttgtttttttagtggggttggtggtgttggaagtttttttttttttttgtagttttagattattaagtttttttagttttcgggtttttagagttatttttgttttataatattttcgaagacgataagatggataatttttttttcggaatttattaatagtgtaattatttttgttggcgtataggtatttttgtttttttttagcggtttttttgaagaagattttgtagtttttatatgtgagagttttatagtgatatttagaagttttatttttatagattaggtaggttttttggggtggaaagtaatagttaatgggtaaaatatggtttttggtagtttttaaacgtatgttttcgtaaggttcggagtagttatttatttaggggtttatttcgtttttgatataagtgggattgggatagggtattttgtttattatgtcgttagggtattatatattaggtgcggtgaagtcgtttttttggttcgttagtttttgagggggtcgagtgtagtcgtagggggttatagttttcgtttcgtcgtcgtcgtcgtcgtcgtcgtcgtcgtcgtcgtcgtcgtcgtcgtcgtcgtcgtcgttattattatttttattattattatacggtttatataattggtttttttcggttgtgaagagagtgtgttaggatgaggaagcggcggttgagggtgatttagaatcgggtttcgttgtattcgcgttatgtaggttcgttaggtttttatagcggtattgcgtcgtcgtagtcgtttaggcgttgtcgtagtttagcgggttttttagtttgatgcgagcgtggggatggggaggcggcggagggggcggcggttcggttagagttagtggaaagttgtagtagtcgcgattttggtacgtagttgtttcgtttagtgtttcggatttgtagagagatagggtagacggtagtttaagtgtttcggagttttttgttgtagcgttgttagagtagtttaggttttcgttttttagttttttggtgtaattttttttgaaaggggaatatttagtagtatttttagtgtttttgtttgcgttgtcgtttagtagagaatttttgtattcggttaatggggtataaggagtgggacgtatagcgggtggaatttttaaaagtggggcgtatatgtaattttttcgaagttgtttttttggatttagatgttttaacgtttttatatttaggtttatggatatcgatattgttttatataattttttggcgttgttagaaatggtcgaagtgttttttaagtaattgtttttggaggaagtgggagttttcgaggtttttttcgttttttcgttgttgttgttttcggatattgttttttgttgttgttgttgaaggagttgtatggtgttggtttcgtttaggatgtttttaaggttagcggagtagttgtttaagtcggggaaagtggggtttagtagggataacgtggatggggtagttgagttattttcgttcggaggtgttggtagttgttgcggtagttttttgttggcggttacggcggttttaggttttgggacgtaatttttttcggggtggtattttagggtcgattgcggttgtgaaggttgttgttttttatttaggattaggtagtttgtggggtttttacgatgggtttggggagaattatttttattttgttgttgttgttgttgtttggggttagttttttgttgttgttgttgttgttgttgttgttgttgttgttgttgttgttgttgtagtagtagtaaattggcgtcgggaggtgttgcgttcgcggtttttgggtgtttggggttcgggttttggattatttcgcgtacgttttggaatagattttggaaagtttttcggtaggttttggacggcggtcgagggtagattttttttagttttaattgtatttttatttttgagtttggttgaattttttatttattttttttatttcgttttttttttttttgtttagaagagtttaataggttgtgatgatgcggtagtcgttgtagttagttgtttatttgcgggaagttttagagaaggaaatttgcgggagtaattacgtaaaaagcgttttgatagttttaaagtttcgtgtagaagaagatatacggtggataagatttgttttgttaggtttatagtttgttttttaatatttgaagggtagatttaaaagatgtttagattttaaaagaaaaaaataaaattttttattttttaaatttagtgtttattgaagtaggtgtaaataagaattgagttattattttttttttttatttcggtttttttgtttttgtttgttttgttttttggttattgaagatttgattgtttttttattttttgatttttgtttcgtattcggggtggggaaggtaggaggaggtggagagagagtgggggaaaatagagggtttttttcgtcggaattt

SEQ ID NO: 101 - DNA, 12000 bp, Artificial Sequence
  chemically treated genomic DNA (Homo sapiens)
tttttattaagttttagggtttttcgtggttgttgggagttgtagtttgaacgtttttattttggcgagaagcgtttacgttttttttatcgagtttcgcggtaatttttaaagtatttgtatcgttttttcgtcgtttgtagagggcgtagtaggttttgtattttttttgtattttattttttaggttttagatttgttttttttatttaaaaaatatttattatcgagtttttatttgttatttagtattgatataggtatttaggaatataataatgaataagatagtagaaaaattttatatttttataaggtttacgtttttatgtattgaaagtaatgaataaataaattttattagagtgataagggttgtgaaggagattaaataagatggtgtgatataaagtatttgggagaaaacgttagggtgtggatattacggaaagtttttttaaaaaatgatatttaattgatgagaagaaaggatttagttgagagtaaacgtaaaagtttttttttttttattttttatatttgatataatgtaggatttttttaaaatgatttttattaattttgtttttatagttttggtttgtagaattttttattttaaaatgttagtatttacggtattaggtcggcgagaattttgattttgtatttttttttttaattttattttttttgtttttttcggtaggcggattatttgtttttatttgttatggcgattgtttagttttgtgttaggagtttcgtaggggttgatgggattggggttttttttttttatgtgtttaagattggcgttaaaagttttgagttttttaaaagtttagagttatcgtttagggagtaggtagttgttgggtttcggggatattttgcgttcgggttgggagcgtgttttttacgacggtgatacgtttttttggattgggtaagtttttgattgaatttgatgagttttttttgagttacgggttttcggtttcgtgtatttttagttcgggaaaatcgttggggttgggggtggggtagtggggatttagcgagtttgggggtgagtgggatggaagtttggttagagggattattataggagttgtattgttgggagatttgggtgtagatgatggggatgttaggattattcgaatttaaagttgaacgtttaggtagaggagtggagttttggggaattttgagtcggtttaaagcgtatttttttgtatatttattcggtgttgggcgtagggaatttttgaaataaaagatgtataaagtattgaggtttgagatttttggatttcgaaatattgagaatttatagttgtatattttagagtttatggtattttagtgaaaattggggttttatttcgaaatgattatttgggggtgattcggggagtttaagttgttaaggttttataattttcggatttttgttttttttggagcgatttttttaggtagttttcggtttcgttagatggagaaaatttaattgaaggttgttagtcgtggaagtgagaagtgttaaattaggggtttgttcgttaggtcgaggaggatcgtcgtaatttgagaggttcggtagttttgttattgtttggttttatatttatatttttgttttttgtagtagtattttcggtttttttttgtcggagtagtttattatttattcgatgagaggggaggagagagagagaaaatgttttttaggtcggttttttttatttggtagagggaggttgttatttttcgtttgtatttttttttttggattatttagttatggtttttgtaaaggtaggggtatttgttttgatgtaaattttaatttttttttttttttgaatggtgtgttttatttttcgggtcgtttgtaatttaggcggacgttattatggcgtagatagggagggaaagaagtgtgtagaaggtaagttcggaggtatttttaagaatgagtatattttattttttcggagaaaaaaaaaaaagaatggtacgtttgagaatgaaattttgaaagagtgtaatgatgggtcgtttgataatttgtcgggaaaaataatttatttgttatttagttttgggttaggttattttagttttagacgtaggttgaacgtcgtgaagcggaaggggcgggttcgtaggcgttcgtgtggtttttcgtgtagttttcggttcgagtcggttttttttggtaggaggcggaattcgaatttatttttttcgttgttttattttttagttcgcggttgttttatttcgtagtttttttttatgtatttgtcgcgtatcggttattttgtgtcgtatttacgttattttttttttaaatcgaggtggtatttatatatagcgttagtgtatatagtaagtgtataggaagatgagttttggtttttaatcgtttcgtgatgtttattaagttatagattttttttatcgttttagaaacgttttattacgtttttttttagtcgattttcgattttatttttattttgatttttataattattttgtttgttggagaattttatatagaatggaattaggatgggcgttgtggtttacgtttgtattttggtttacgtttgtattttgggaggtcgaggcgggcggattatttgaggataggagttttagattagcgtggttaacgtggtgaattttcgtttttattaaaaaatataaaaattagttgggcgtggtgggtgtttgtaattttagttattcgggagggtgaggtaggagaatcgtttgaattcgggaggtagaggttgtagtgagttaagatcgtgttattatattttagtttgggcgataagaacgaaatttcgttttaaaaaaaaggggggaattatatattatgtgtttatttttgtcgggtttttgttttttaatgtattgtttgatattcgtttatgttgtatatattagtattttgtttttttttatttagtatagtttatcgattgtatattcgtttttttgatggttttttgagttgttttttatttgcggttatgaaataaagttgttataaatatttttgtataattttttttgtgattatatgttttcgtgttttttggagaaatatttaggaggggaattgtggaggaagtaaaaagtagttgtattttgaatttttttagaagttttgagttttttagagcggttgtattattttatattttaattagtaaggtatgggagttattatggttgtgttatagtttttcggatattaggtatgttagtttttttaatgtggtatatttttgtggttgtaatttatagttttttattgattaaggatgtttagtatttttttatgtgtttattggttattcgtattttgtttgtaaagtagtttttcgagttttttatttgttattttggtttttttgtttgtttttattgtttagttgtgggattgttttatattttttggatataagtttttattagatttatgagtcgtgaatgtttttttttgatttgttgcgggtttatttgtttgttttatagagtttatagaattttaagaggagtggattaattttttttatgtttagtatttgttttgttttgtttaggatatttttttttttttttttaattttagggttatgaagatataattttatatttttttttaggatttttatggtggtaagttttatagtaaggtttttaagttattaattaatttttaaaattaattgtttatggtgtgaggtgtaggagttagtttttggtattttttttgtatggaaatttagttattttgtttttatttgttgaaataggttttttttttttattgaatgtttttaattttaattattttatagttggagtatagggttattattttagtgttattttttttttttttttgttaatttttgagatagggatttatattgttgtttaggttagagtataatggtataattaaggtttattgtagtttcgaatttttgggtttaagtagttttttagtagttttacgagtagttgggattattttattatatttagttaattattttatttttttgtattgataggattttattatgttgtttaggttggttttaaattgttggttttaagtttttattttatttcggttttttaaagtgttgggattataggtgtgagttattatgtttgattttttagtgttattttttatttattttttttgttttttgttttttttaaacgttggaggaagaaatagtatttattttatataaattttttagaaaatagaggaatagattgggcgcggtggtttatatttgtaattttagtattttggtacgttgaggtaggggattatttgaggtcgggagttcgagattagtttggttaatacggcgaaattttatttttattaaaatataaaagtagttaggcgtgtattatatttgtaatgttagttatttaggaggttgaggtataagaattttttgaatttgggaagcggaggttgtagtgagtcgagattgcgttattgtattttagtttgggtaatagagtgagattttgttttagaaaaaaaaagaaagaaagaaaaaatagaggaatattttttaatttgttttcgaagttaggataattttggtattaaaattaaataaggatattataagaaaagaaaatatagattaatatttttgttagtatagatatgtaatagttaattaattttagtaaattaaatttggtaatatagaaaaaaggataaataggttagtcgcggtggtttacgtttgtaattttagtattttgggaggttgaggtaggtagattatttgaggttaggagtttgagattagtttgattaatatggtgaaatttcgtttttaataaaaatataaaaattaggttgggtacggtggtttacgtttgtaattttagtattttgggaggtcgaggtgggtagattacgaggttaggagtttaagattagtttgattaatgtggtgaaacgttatttttattaaaaatacgaaaattagtcggtgtggtggtatttgtttgtaattttagttatttaggaggttgaggtagaattgtttgaattcgggaggtagaggttgtagtgagttaagatcgtgttattgtattttagtttgggcgatagagtaagattttattttaaaaaaaaaaaaaattagttgggtatggtggtgggtatttgaaattttagttattcgggagtttgaggtaggagaatcgtttgaatttaggaggtagaagttgtattgagttgggattatattattgtattttagtttgggtaatagagtgagattttattttaaaaaaagaaaaagaaaaaggataaatatattttaattaaataatgtttattttatgattgtagttgatttaatatttaaaaattggtttggtgtagtagtttaggtttgtaattttaatattttaggaggttgaggtaggaagattttttgagtttaggattttaagattagtttgggtaatatagttagattggtttttattggggggaaaaaaattagtttgtgtaatttattatattaataaagggaaatataaaaattttatgattattttaatagatgtagtaaaagtagttaatgatattaatatatatgtatgattataaattaattaattttttagtaaattagggaaaggaaatttaattagtttgataatagggcgtttatagtcggagttttattagtagtatatataatggtagaaaatttagtgttgttgggggcggtggtttacgtttgtaatgttagcgttttgggaggtttaggcgggcggattacgaggttaggagatcgagattgttttgattagtatgttgaaatttcgtttttattaaaaatataaaaataaaaaattagtcgggtatggtggcgggcgtttatagtgttagttattcgggaggttgaggcgagagaatggcgtgaattcgggaggcggagtttgtagagtttagatcgtgttattgtattttagtttgggtgatagagtgagatttcgttttaaaaaaaaaaaaaaaaaaaaaagaaaagaaaatttaacgtttttttttttaagattaggaattagaaaaggatttgatttttataacgttgatattatattggaggttttaattaggtaagaaaaagaaataatgagggtcgggtgcggtggtttaggtttgtaattttagtattttgggaagtcgagacgggtggattacgaggttaggagatcgagttattttggttaatacggtgaaattttgtttttattaaatatataaaaaattagtcgggcgtggtggcgggcgtttgtagttttagttattcgggaggttgaggtaggagaatggcgtgaatttagggggcggagtttgtagtgagttgagatcgagttattgtattttagtttgggcgatagagtaagattgtgttttaaaaaaaaaaaaagaaaaagaaataatgattagtggttcgatgttttacgttagtaattttagtattttgggaggtcgaggtgggtagattatttgaggtttggagttggagattagtttgataaagatggtgaaatttcgtttttattaaaatattaaaaaaatagttaggcgttggtcgggtatagtggtttatgtttgtaattttagtattttgggaggtcgaggtgggtggattatttgaggttaggagtttaatattagtttggttaatatggtgaaattttatttttattaaaaatataaaattagtcgggcgtagtggcgggcgtttgtaattttagttatttgggaggtttaggtaggagaatcgtttgaatttgggaggcggaggttgtagtgagtcgagattgtattattgtattttagtttgggtgataaaagtaaaaatttcgttttaaaaaaaaaagaattagttaggggtagtggtgaacgtttgtagttttagttatttaggaggtagaggtaggagaattatttgaatttcggaggtagaggttgtagtgagtcgagattgttttattgtattttagtttaggcgagaagagtaaaattttatgttaaaaaaaaaaaaaaaaaaggaaagaaaaaaaataacgattagaaaggaagaaattaaatatatttatagttagtatgattttatatatattatggttttaatggggttaggcgtggtggtttatgttgtaattttagtatttttaggaggttgaggtaggtggtttttttgggattagttggttaatatggtgaaattttaattttaataaaaatataaaaaattagttaggcgtggtgagggtatttttaattttagttatttaggaggttgaggtaggagaattgtttggatttgggaggtagaggttgtagtgagtcgagatcgcgttattgtattttagtttgggtaataagagtgaaatttcggtagggtgtggttttacgtttgtaattttagtatttcgggaggttgagttaggtcgattatttgaggttaggagtttgagattaatttaatatggtgaaatttcgtttttattaaaaatataagaattagttgggtgtagtggtgggcgtttgtaattttagttatttgggaggttgagatagaagaattgtttgaatttaggaggtggaggttgtagtgagttgagattatgttattgtatattacgtcgggtaatagagcgagatttcgttttaaaaaaaaaaaaaagatgaaattttattttaaaaaaaaaaaaaagttttaatggaaaatttataaaaagttattaaaattaataaataaatatagtagggttgtaggttatagggtaatatagttatttttttatttgtaggggtttggttttgggattttttatatattaaatttatagatgtttaagttttatatataagacggaatagtatttaatttatatatatttttttatatagtttaaattatttagattatttatattatttttatataatgaaaatgttaatgtatatgtaagtatgtatgtaagtatttgtattatattgtttagggaattattggatagataggtttttaagattgatattagtagttattgttaagattttggttaggtttgtttttgtttggggttttagttgattttattgtttttttatttagttaagggtatttgtattttttttggttttttggttatttggaaggtttagtttagtttggtatatttgtattttggtttattgatgttggtatttttgggaaggttttgttttgaaaaatacggagattttagttgttattgaagatttgagagataaagatagggagatttgtttgtagatttgtgtttttttaagtgggattgagattttgggttttttattttaggatagtattttttggtttgttgattgaatagatttttgaaggaggtgtagttgtattttaggagtgggggtgggagtagtattattgattcgtattaataattatatagttttttttagaataataatatagaataagtgaaatagaataattgtagaaagagttaatttttgttgagtttttattgtgtgtttagtattttttttaattttatattttttataatatatagagtattaggtaggcggggtttgggggtttacgtttgtaattttagtattttaggaggttaaggggggtggattatttgaggtcgggagtttaagattagtttgattaatatggtgaaatttcgtttttattagaagtataaaattagttaggtgtggtggtatatgtttgtagttttagttatttagtaggttgaggtaggagaattatttgaattcgggaggaggttgtagtaagcggagatagtgttattgtattttagtttgggtaataagagttgagatttcgttttaaaataaaataaaataaaataaaataaaataaaataaaataaaaaaagaaaagagtttgttattaaaggagttgtttggtaggggatgttttgttagtgtaaataatagaaaagtgggttgggtatagtggtttatgtttgtaattttagtattttgggaggttaaggcgggcggattatttgaagttgggagtttaagattagtttgattaatatggagaaatttcgtttttattaaaaatataaaattagtcgggcgtagtggtcgatgtttgtaattttagttattcgggaggttgaggtaggagaatcgtttgaatttgggaggtagaggttgcggtgagtcgagatcgtattattgtattttagtttggacgagagtaaaattttgttttaaaaaaaaaaaaaaatagaaaagtgtaataaatatttatagtaggtatgttttttagtaaatttgatgataaatttggtataaagaaagagagtatttttgaaaaaaaaaaaaagaaaaagaaagagagtattttgtttgggtaatatagtgaaattttgtttttataaaaaaatttaaaaattggtcgggtgtagtggtttatatttgtaattttagtattttgggagtcggaggcgggaggattatttgaggttaggagttcgaaattagtttggttaatatggtaaaattttatttttattaaaaatataaaaaattaattaggcgtattggtgggcgtttgtaattttagttatttaggaagttgaggtaagaggatcgtttgatattgggaggtggaggttatagtgagtcgagattatattattgtattttagtttgggtgatagggcgagatttcgtttttaaaaaaaaaaagaaaaagaaaaagattaaaaaattagttaggtaggtttttgtggttttagttatttgggaggttgaggtaggagaattattgagtttaggagtggtaggttgtagtgagttatgattgtattattgtattttagtttgggttttaaagtaagattttgttttaaaagaaaaaagaaagaaagaaagaatatggcgggttaggtatagtggtttatatttgtaattttagcgttttgagaggtcgaggtaggtggattataaggttaggagttttatattagtttggttaatatggtgaaattttgtttttattaaaaatataaaaaattagtaggtagggtggtaggggtttgtaattttagttattcgggaggttgaggtaggagaattgtttgaaattagaaggtagaggttgtagtgagtttagattgtattattgtattttagtttgggcgaaaagagttaaattttattttaaaaaataaataaaaaaataaaataaaaaaaaatatggtagtttttgaaagtttgtttgggagaaggtgcgatgatggttgtataatttcgtgtaagatgttggtttatataggggttgttttttgttttttttcgtttttttaattttttatataataggtttgtgtgttatgtatatttattgagtttaagtaggtgtaaggtattgtgatttaatattttggttagtaagataataagatagattattgttttgtttttaggaagtgtatatgttattagaggaaatagataaaataaataaggaaaagtattagataatgtaagtgttatgagaatgtaaatgaggtgatgtgaattaaaataggatgatttaagtttgtacggaaggtttttatttttatgtttttggttagttaaggaattattagttgattagtagagaagggtagttcgtttagttagagtttttggggaagagggagtggttgttaagagatgagattaaagaagtcgagacgggtttttcgtgagggggggttgtaatgtagggttgaggagtgttcgaagagaatgggtaggtgagcggtgagatagttgtttttttagaagttttgtagtgaaaggaattaaagaaatggagtcgtgtattaggtggggaagggtgggggttaagggggtgtttttttttatatagagattgtaggttgagaatgattatatttttgttaataggaggtgggagtagggtacggtagtttatatttgtaattttggtattttaggaggcggaggcgggtcgattatttgaagtaaggagttcgagattagtttggttaatatgtaaagttttgtttttattaaaaatataaaaattagttgggtgtggtggtattcgtttgtaattttagttattcgggagattgaggtaggagaatggtttgaattcggaaggtagaggttgtagtgagttgagattatgttattgtgttttagtttaggtgatagagagagattttattttaaaaaaaaaaaaaaatataggaagggagttgggaatagggtgtatatttaggaagttttggggatttagtggtgggaaggttggaagtttttttttgattgttttttttttaaagaagtgtatggttggtgtggggtggggtaggagtgtttgggttgtggtgaaatattggaagagagaatgtgaagtagttattttttttttgttttataggaagtcgagttgttttagatattggtatggtgttgggggaggggtttttttttttgtaggtttaggtgatttagggttggaagcgttttatgttggatttttatttttttttttgtagtagttagattgtttttcgggttattgttatggaggagtcgtagttagattttagcgtcgagttttttttgagttaggaaatatttttagatttatggaaattgtgagtggatttattggaagggtaggttattatttcgattttaattttagttttttagtagagatttgtgggaagcgaaaatttatgggattgattttttgtttttgttttttagattttttgaaaataacgttttggtaaggataagggttgggttgggatttggagggttgggggggttggggggttgaggatttggttttttgattg

SEQ ID NO: 102 - DNA, 12000 bp, Artificial Sequence
  chemically treated genomic DNA (Homo sapiens)
tagttagaggattaggtttttagttttttagtttttttagttttttaggttttagtttaatttttgtttttattagaacgttgtttttaggaagtttgaaagataagagtagaaagttagttttatgaattttcgttttttataggtttttgttagggggttggggttggggtcggggtggtggtttgtttttttaatggatttatttatagtttttataggtttgaaaatgttttttgatttagagggggttcgacgttaggatttgattgcggtttttttatggtagtgattcggaaggtagtttggttgttgtaagaggaaaagtggggatttagtatgagacgtttttaattttgggttatttgggtttgtagaggaggaggttttttttttaatattatgttagtgtttgagatagttcggttttttgtggagtaggaaaagaatggttgttttatatttttttttttaatgttttattataatttaagtatttttgttttattttatattagttatgtatttttttgaggaaaagataattagagagggatttttaatttttttattattaaatttttaagattttttaaatgtgtattttatttttaattttttttttgtatttttttttttttttgagatggagtttttttttgttatttaggttggagtatagtggtatgattttagtttattgtaatttttatttttcgggtttaagttatttttttgttttagtttttcgagtagttgggattataggcgagtattattatatttagttaatttttgtatttttagtagagatagggttttgtatgttggttaggttggtttcgaattttttattttaggtgatcggttcgttttcgttttttaaagtgttaagattataggtgtgagttatcgtgttttgtttttattttttgttaataaggatatagttatttttagtttgtaatttttgtatggggaaggatatttttttggtttttatttttttttatttgatatacggttttatttttttgattttttttattgtaaagtttttggaagaataattgttttatcgtttatttgtttatttttttcggatattttttagttttgtattataatttttttttacgaagggttcgtttcggtttttttaattttattttttaataattatttttttttttttaaaagttttagttagacgggttgtttttttttgttaattaattggtggttttttggttagttaggaatatgggggtaggggtttttcgtgtagatttaagttattttattttaatttatattattttatttgtatttttatagtatttatattgtttgatatttttttttgtttattttatttgttttttttaatagtatatatattttttaagggtagggtagtgatttattttgttgttttgttgattaaagtattagattataatgttttgtatttgtttgggtttaataaatgtgtataatatataagtttgttatatgagaggttaagagagcgagaaagagtaaggggtagtttttgtgtggattagtattttgtacgaagttatgtaattattatcgtatttttttttagataagtttttaaaggttgttatgtttttttttgttttgtttttttgtttgttttttgagatggagtttggtttttttcgtttaggttggagtgtagtggtgtagtttaggtttattgtaatttttgttttttggttttaagtaatttttttgttttagtttttcgagtagttgggattataggtttttattattttgtttgttgattttttgtatttttagtagagatagggttttattatgttggttaggttggtgtggaatttttgattttgtgatttatttgtttcggttttttaaagcgttgggattataggtgtgagttattgtgtttggttcgttatgttttttttttttttttttttttttttgaggtagggttttgttttgaagtttaagttagggtatagtggtgtaattatggtttattatagtttgttatttttgggtttagtgatttttttgttttagttttttaagtagttgggattatagaggtttgtttggttaattttttagtttttttttttttttttttttttttggagacggagtttcgttttgttatttaggttagagtgtagtggtgtgatttcgatttattgtaatttttattttttagtattaagcgatttttttgttttaattttttgagtagttgggattataggcgtttattaatgcgtttgattaattttttgtatttttagtagagatggggttttgttatgttggttaggttggtttcgaatttttgattttaggtgattttttcgttttcgatttttaaagtgttgggattataggtgtgagttattgtattcggttaatttttgagtttttttgtagaggtagggttttattatgttgtttaggtaggatgtttttttttttttttttttttttttttttagggatgttttttttttttatgttaaatttgttattagatttgttaagaaatatgtttattgtaagtgtttgttatatttttttgtttttttttttttttgagatagagttttgttttcgtttaggttggagtgtaatggtgcgatttcggtttatcgtaatttttgttttttaggtttaagcgatttttttgttttagtttttcgagtagttgggattataggtatcggttattgcgttcggttaattttgtatttttagtagagacggggtttttttatattggttaggttggttttgaatttttaattttaggtgattcgttcgttttggttttttaaagtgttgggattataggtatgaattattgtgtttagtttatttttttgttgtttgtattgataaaatattttttattaaatagtttttttaatggtaggtttttttttttttttattttattttattttattttattttattttattttattttgagacggagttttagtttttattgtttaggttggagtatagtggtattattttcgtttattgtaattttttttcggatttaaatgatttttttgttttagtttgttgagtagttaggattataagtatgtgttattatatttggttaattttgtatttttagtagagacggggttttattatgttagttaggttggttttgaattttcgattttaggtgatttattttttttggttttttaaagtgttgggattataggcgtgagtttttaagtttcgtttatttagtattttatgtattatgggaaatgtagagttgaggaaagtgttgggtatatagtaagagtttaataaaggttagttttttttgtaattgttttattttatttgttttatattattattttagagagaattgtgtgattgttagtgcggattagtggtattgtttttatttttatttttaaaatgtaattatattttttttagggatttatttagttaataggttaggaggtgttgttttgaaatggggggtttaaagttttaattttatttggagggatataggtttatagataggtttttttgtttttattttttaaatttttagtagtaattaaaattttcgtgttttttagagtaggatttttttaggggtattagtattagtgggttaggatataaatgtgttaggttgaattaggttttttaaatggttagggagttaagagaaatgtaggtgtttttggttgggtgggaaggtaatgagattaattgagattttaaataggggtaggtttgattagaattttaatagtggttgttggtattagttttgaaggtttatttgtttagtgattttttaaataatatagtataagtatttatatatatatttgtatgtatattagtatttttattgtatgggggtaatgtaagtaatttagataatttaaattatatgggaggatatgtgtaggttaaatattatttcgttttatatatgggatttagatatttgtgggtttggtgtgtgaggagttttagaattaagtttttatagatagagggataattatattgttttgtaatttgtaattttgttatatttatttattagttttggtagttttttatggattttttattaggatttttttttttttttgagatagagttttattttttttttttttttgagacggaatttcgttttgttgttcggcgtggtgtgtaatggtatgattttagtttattgtaatttttattttttgggtttaagtaatttttttgttttagttttttaagtagttgggattataggcgtttattattatatttagttaatttttgtatttttagtagagacggggttttattatgttaggttggttttaaatttttgattttaggtgatcggtttggtttagtttttcgaagtgttgggattataggcgtaagattatattttgtcggagttttatttttgttgtttaggttggagtgtaatagcgcgatttcggtttattgtaatttttgttttttaggtttaagtaatttttttgttttagttttttgagtagttgggattagaggtgtttttattacgtttggttgattttttgtatttttattagagttggggttttattatgttggttagttggttttagggaagttatttgttttagttttttaaaagtgttaggattatagtatgagttattacgtttggttttattaggattatggtatgtatagaattatattggttgtgaatgtgtttgatttttttttttttaatcgttattttttttttttttttttttttttttttttttgatatggaattttgtttttttcgtttaggttggagtgtaatgggataatttcggtttattgtaatttttgttttcggggtttaagtgatttttttgtttttgttttttgagtagttgggattataggcgtttattattatttttggttaatttttttttttttgagacggagtttttgtttttgttatttaggttggagtgtaatggtgtaatttcggtttattataattttcgttttttaggtttaagcgatttttttgtttaagttttttaagtagttgggattataggcgttcgttattacgttcggttaattttgtatttttagtagagatggggttttattatgttggttaggttggtgttgaatttttgattttaggtgatttatttatttcggttttttaaagtgttggggttataggtatgagttattgtattcggttaacgtttggttatttttttaatattttaatagagacgaggttttattatttttgttaggttggtttttaattttagattttaggtgatttgtttatttcggttttttaaagtgttgggattattggcgtgagatatcgggttattaattattatttttttttttttttttttttttgagatatagttttgttttgtcgtttaggttggagtgtagtggttcgattttagtttattgtaagtttcgttttttgagtttacgttatttttttgttttagtttttcgagtagttgggattataggcgttcgttattacgttcggttaattttttgtatatttagtagagatagggttttatcgtgttagttaggatggttcgattttttgatttcgtgatttattcgtttcggttttttaaagtgttgggattataggtttgagttatcgtattcggtttttattattttttttttttgtttggttaaaatttttagtatggtattaacgttgtgagagttaaatttttttttagtttttgattttagaggaaaaagcgttgagttttttttttttttttttttttttttttttttgagacgaagttttattttgttatttaggttggagtgtagtggtacgatttaggttttgtaagtttcgtttttcgggtttacgttattttttcgttttagtttttcgagtagttggtattataggcgttcgttattatgttcggttaattttttgtttttgtatttttagtagagacggggttttagtatgttagttaggatagtttcgattttttgatttcgtgattcgttcgtttaggttttttaaagcgttggtattataggcgtgagttatcgtttttagtagtattgagttttttattattatgtatgttgttagtggaatttcgattgtggacgttttgttattaaattagttaagttttttttttttagtttgttaggaggttggttggtttgtaattatgtatatgtgttgatattattaattgtttttgttatatttgttgaaatgattatagggtttttatgtttttttttgttaatgtggtgaattatatagattgatttttttttttttagtaaagattagtttgattatgttgtttaggttggttttgaaattttgggtttaagagatttttttgttttagttttttaaaatgttgggattataggtttgagttattgtattaggttaatttttgaatgttgaattagttataattatgagataaatattatttggttagaatgtatttattttttttttttttttttttttgagatggagttttattttgttgtttaggttggagtgtaatggtgtgattttagtttagtgtaatttttgttttttgggtttaagcgatttttttgttttagattttcgagtagttgggattttaggtgtttattattatgtttagttaattttttttttttttgagatgaagttttgttttgtcgtttaggttggagtgtagtggtacgattttggtttattgtaatttttgtttttcgggtttaagtaattttgttttagttttttgagtagttgggattataggtaggtgttattatatcggttgattttcgtatttttagtagagatggcgttttattatattggttaggttggttttgaatttttgatttcgtgatttgtttatttcggttttttaaagtgttgggattataggcgtgagttatcgtgtttagtttgatttttgtatttttattagaaacggggttttattatgttggttaggttggttttaaatttttgattttaagtgatttgtttgttttagttttttaaagtgttgggattataggcgtgagttatcgcgattggtttatttatttttttttttatattattaggtttggtttgttaaaattggttagttgttgtatgtttatgttaataggaatattggtttatattttttttttttataatgtttttgtttggttttggtattaggattattttggtttcgaaaataagttgggaaatatttttttattttttttttttttttttttttttttgagatagggttttattttgttgtttaggttggagtgtagtggcgtaatttcggtttattgtaattttcgttttttaggtttaagggatttttgtgttttagttttttgagtaattggtattataggtatggtgtacgtttagttatttttgtattttagtagagatggggtttcgtcgtgttggttaggttggtttcgaattttcgattttaaatgattttttgttttagcgtattaaagtgttgagattataggtatgagttatcgcgtttagtttgtttttttgttttttgaagagtttgtgtaagatgggtattgtttttttttttaacgtttaaagagagtagagaatagaggagataaatagaaaatagtattaagaggttaggtatggtggtttatatttgtaattttagtattttgggaggtcgagatgggatgaaagtttgaggttagtagtttgagattagtttgggtaatatagtgagattttgttaatataaaaaaataaaatagttagttgggtgtggtggagtaattttagttattcgtgaggttgttagaggattgtttgagtttaggggttcgaggttgtagtaagttttgattgtgttattgtattttagtttgggtaatagtgtgagtttttgttttaaaaattaataaagaaaaaaagaaaatagtattaaaatggtagttttatattttaattgtaaaataattaaaattaaaagtatttagtagagaaaggaagtttattttaataagtggagatagaataattggatttttatataggaaagatattagagattgatttttatattttatattataaataattaattttaagaattaattaatggtttaaggattttattgtaaaatttattattataaaggttttaaaagaaaatgtaagattatatttttatgattttggggttaaaaaaaaaaaaaaagatgttttaaataggataaggtaaatattgaatataaaaaagattaatttattttttttaagattttgtaaattttgtaaagtaaataaataggttcgtaatagattagaagaaaatatttacgatttatggatttgataaggatttgtatttagaaagtataaagtagttttataattgaataataaaaataaataaaaaaattaaaataataggtaaaagattcgaagagttattttataaataaaatacgaatggttaataggtatatgaaaaaatgttgaatatttttagttaatagagaattgtaaattataattataaggatatattatattagaaagattgatatatttaatgttcggaaggttgtggtataattataataatttttatattttgttagttggagtgtaaaatggtataatcgttttggaaaatttagagtttttgaaaaagtttaaaatatagttattttttattttttttataattttttttttaagtatttttttaagaaatacgaaaatatatgattataaaaagaattgtataagaatgtttatagtagttttattttataatcgtaaatgggaaataatttaaaaggttattaaaaggacggatatataatcgatggattatattaaatgaaaaggagtaaaatattgatatatataatatgaacgaatgttagatagtatattgaaggatagaagttcgataaaaatgagtatataatgtatgattttttttttttttttgagacggagtttcgtttttgtcgtttaggttggagtgtagtggtacgattttggtttattgtaatttttgtttttcgggtttaagcgatttttttgttttattttttcgaatagttgggattataggtatttattacgtttagttaatttttgtattttttagtagagacggggatttattacgttggttacgttggtttggaatttttatttttaagtaattcgttcgtttcggttttttaaagtgtaggcgtgagttaaagtgtaggcgtgagttatagcgtttattttgattttattttatatgaagttttttaataggtaaaatggttatggagattaaaataaaggtggggtcgggaatcgattgggaagagacgtgatgaaacgtttttgggacgatgaaaagggtttgtgatttggtaggtattacggagcggttaggggttaaaatttatttttttgtgtatttgttgtgtgtattggcgttgtgtgtaaatgttatttcgatttaggaaaaagatgacgtaagtacggtataaagtggtcggtacgcggtaggtgtatgggaagaaattgcggaatgaaataatcgcgagttaagagatggggtagcgggagaaatgaattcgagtttcgttttttattaggaagaatcggttcgggtcgagggttgtacggaggattatacggacgtttgcgggttcgtttttttcgttttacgacgtttagtttgcgtttggaattggaatggtttagtttaaagttagataataggtagattgtttttttcgataaattattaaacgatttattattgtatttttttaaaattttatttttagacgtattattttttttttttttttttcgggaagatgagatatgtttatttttgaaagtgttttcgggtttgttttttgtatatttttttttttttttgtttacgttatggtagcgttcgtttaggttgtaggcgattcggggggtggggtatattatttaaagaaggggagggattgaggtttgtattaaaataaatatttttgtttttgtaaaggttataattaagtaatttagaaaaagaaatgtaggcggagaatagtagtttttttttgttaagtaagaggaatcggtttaaaggatatttttttttttttttttttttttttatcgggtgaatagtgagttgtttcggtaaaaagaaatcggaaatgttgttgtaagaggtagaaatgtaaatgtggagttaaataataatagggttgtcgggttttttagattgcgacggtttttttcggtttggcgggtaaatttttggtttagtattttttatttttacgattgatagtttttaattggattttttttatttagcggagtcgggggttgtttggaaagatcgttttaggaaggataaaggttcggaagttgtgggattttagtagtttgggtttttcggattatttttaaatgattatttcggaatggagttttagtttttattaggatgttatgggttttaaaatatatagttatgagtttttaatgtttcgagatttaaaagttttagattttaatgttttgtgtattttttattttagggattttttacgtttagtatcgggtggatgtgtaaagaagtacgttttaggtcggtttaaggttttttaaagttttatttttttgtttaggcgtttaattttgagttcggatggttttaatatttttattatttatatttaggttttttaataatgtaatttttatgatgatttttttagttaagtttttattttatttatttttaaattcgttaagtttttattgttttatttttagttttagcgattttttcgagttgaaaatatacggagtcgagagttcgtgatttagagaggatttattaagtttagttaggagtttatttaatttagggaagcgtgttatcgtcgtggaaagtacgtttttagttcgaacgtaaagtgttttcggagtttagtagttatttgttttttggacggtggttttagatttttgagaagtttaaaatttttagcgttagttttgagtatatgggaggggaaaattttaattttattaatttttgcgaggtttttggtataaagttggatagtcgttatgataagtaagggtaagtaattcgtttgtcggaggaagtaaaggaaatggagttggggaggagggtgtagagttaggattttcgtcgatttggtgtcgtagatattaatattttggggtggaaaattttgtaagttagagttgtgagggtagaattggtggaaattattttggaggaattttgtattgtgttaaatatgaagggtggaaggaagaaagtttttgcgtttgtttttagttggattttttttttttattagttaaatgttattttttaggaaggtttttcgtaatatttatattttaacgtttttttttagatattttatattatattattttatttaattttttttataatttttattattttgataagatttatttgtttattgtttttagtatatggaaacgtaagttttatgaggatatagaatttttttattattttatttattgttgtatttttgagtgtttatattagtgttgggtagtaagtaagagttcgataataaatattttttgaatgagggagataggtttgaagtttggagaatgagatgtagaagaggtgtaagatttgttgcgttttttgtaggcggcgggggggcggtgtaggtgttttaagaattatcgcgggattcggtagggggagcgtaggcgtttttcgttaagatagaagcgtttagattataatttttagtagttacgaggagttttagggtttgatgggaa

SEQ ID NO: 103 - DNA, 3001 bp, Artificial Sequence
  chemically treated genomic DNA (Homo sapiens)
ttgttataattgggtcggtaggggaagaagggaagggggatttggatgggttttcgtaaaataggtgaaaataaggggtgaagagtaggggattgaggaatagtaaaggaaaataaagatattatttttaatagaagagttggaggggggaaaaaaaaagtaagatttaattacgattttttttttatttttagtttttattttttttaaattaggaaatttttatttggaaagaaaaatagatataaaatataaaaacgaaaagtaaatataatagaatagaaaaagtagtattagggaaagtggttaggatagaggtttttaataagattagtaattatagtagcggaaattagaaaagttggaaggggaagattaatttataaatttttgatttgaaagtaatagtgaggaaatagaatagataataaaaggtaaaatatgattaataatttagtaaagtggaaaatggagatgataagtagagttttgaaaagtttttaaaggaagatttcgttttttttattataattttatcgttatggatgtttaatttagtagttattagttaagggtgatagatgagggttattattgcgtaaagcgtttatttttcgaaaagaaaatattatatggtcgtcgtttattttttatagtttttagttttttattttttagtattttttttttcgttgtttaagtaagttttgtgtaattagtatgggggggaggggcggtgtaagataaatggttcggttataaaaaaataaaatttatgtttttattttataataagaaagttaataggtgatagagaaaggtaattttcgtttaggttttaataggatttttattaagtggttttatattattgttacgttacgaaggtgagattttttttggagaaatatataatgatattaatcgtatcgtaaatatttggaaggtattttaaattaagttgggtaagttaaggtgagaaaaatttaattgggtttagaaattagtttttttttttagttttatcgagggtcgaaaaagagtttaagaaagaataaggaaggtgagaagagtttcgtttttcgtaaatattaagattaagggacgtcgagtatcgttttttattgatgttgaggtttttaatatgagaagaatttattggaagaagggagtaaaacgaatataatggcgtcgaggatattattttggattgggtttttttttagtttttttttttttttttaggagttttttgttttcgaaagggatgtaagttaaggaaatagcgaattaattaggttttagcgattagattatcgtttgtgaaaagggtattaggaatttatgtgacgggatgggtgcggagaagcgtagatggaaacggattgtagcgaaggttaaagtttatttaaatagggagagcgcgtatggcggtagtaatagcgacgaaggagggaaatttgtttttattttcggttgtaggtttttttttattttagtttttcgtttttttggttgtaagagcgtaggcgtaagggatcggaaatagggtttttcgcggttatatagattcgtgcgttttaggtttgtttttggaaaatgtttgtttgaaatttgttttaaaatcgtttttaattttattgttatcgttagtaataaaagatataaaggaaattaacgtttgttttttattgttatttttatttttttattttatttttttttatgttttttattttttcgtttaggtttttgttacgtaggttttttttgtaggtattttttcgtggatgcgcgaggaacgagtgtggcgaaggttgcgagtttttacggggtttttggttcggtagtgaaggtgatttgaggattgttgggtacgtattaggaatcggtaggttttagttgaggggagggaggagggaagttttagggaattggattgttcgggggtgtttttcgatttttttttagtcgtggggttggtgggcggtatttttttaaaaggatgttgttcgaggtagttgatgttttagggttagtgagttaggaaggtgttttgaattcgagcgggaagacggggtttggattcggttttaagtgttaatagtagggtttgagggttatattatattttattaatattgtttttgtttttgttttgagatagagtttcgttttgtcgtttaggcgggagtgtaatgttttgatttcggtttattgtaatcgttgtttttcgggtttaagcgatttttttgttttagtttttcgagtagttaggattataggcgttcgttattacgtttagtaaatttttgtttttttagtagagacggggttttatttatgtatgattttaggtgatttatttatttcggttttttagagtgttgggattataggcgtgagttatcgcgttcggtttattaatattgttaattcgagtagaatgtttttggtttcgttttaatagttttattgtttaatttggattttttttttgaatgaaatatttgttattttcgtttttgagatggggagttataaaagtaagatttgatgttttgttgtgtaataaaataataaacgtttggttttttttttgttagtatatttaattatttaatattaaggagtaggtatcgttatttttattttattgatagaagcgaagtaaagtaatatattttaagtagtacggttggtgaggttatagttaggatgtaaatattttttattttttattgtattttgtttttttgtttaaagaatttggttagtaaatatattgtaggttattttattggtttaaatttttggtgaagtaagtttgtttttagtgataaatgaagtaattaatttaagaatggtgttatagaaggtatttttttaagtattatttaatttatttaaaagtatttattaattgttttttttgtgttatatgttgttttaggatttggggatataacggtgaatagttttgtttttatagtgtttatat

SEQ ID NO: 104 - DNA, 3001 bp, Artificial Sequence
  chemically treated genomic DNA (Homo sapiens)
atgtaaatattgtgagaatagggttgtttatcgttgtgtttttagattttaggataatatgtggtataagggaggtagttgataaatatttttgaataaattaaatgatatttgggaaaatattttttatgatattatttttgaattagttattttatttgttattgaagataagtttattttattaagaatttgaattaataaggtaatttgtagtgtatttattaattagattttttgagtagggaggtagaatataatagagaatgagagatgtttgtattttggttgtaattttattagtcgtattgtttgagatatgttgttttgtttcgtttttgttaataagatgagaataacggtatttattttttagtattaaatgattaagtatgttaatagggagagggttaaacgtttgttgttttattatatagtaggatattaggttttatttttgtggttttttattttaaagacggggatagtaaatgttttatttaggaaaaaaatttaggttgaataatggggttgttggggcggggttaagaatattttgttcgaattaatagtattaatgggtcgggcgcggtggtttacgtttgtaattttagtattttgggaggtcgaagtgggtggattatttgaggttatatatgggtgaagtttcgtttttattaaaaaaataaaaatttgttgggcgtggtggcgggcgtttgtaattttagttattcgggaggttgaggtaggagaatcgtttgaattcgggaagtagcggttgtagtgagtcgagattaggatattgtattttcgtttgggcgatagggcgagattttgttttaaaataaaaataaaaatagtattaatggaatgtagtataatttttaagttttattattaatatttggggtcgaatttagatttcgttttttcgttcggatttagaatatttttttgatttattggttttagggtattagttatttcggatagtatttttttgggaaaatatcgtttattagttttacgattgggaaagagtcgggaaatattttcgagtaatttagttttttgagattttttttttttttttttttagttagggtttgtcggtttttagtgcgtgtttagtagtttttaggttatttttattatcgggttaaggatttcgtgggaattcgtagttttcgttatattcgtttttcgcgtatttacggaggggtgtttatagagaagatttgcgtggtaaaaatttaaacgaagagatgaggggtatggagaggagtaggataagagaataaagataatagtggggggtagacgttagttttttttatattttttgttattggcggtagtagtgaagttagaaacggttttaaaataaattttagataggtattttttaaaggtaagtttggagcgtacggatttgtataatcgcggaaggttttgttttcggttttttgcgtttgcgtttttgtagttaagaaggcgggaggttggagtagagggaagtttgtaatcggaagtgaaggtagatttttttttttcgtcgttgttgttgtcgttatacgcgttttttttgtttaggtaagttttggttttcgttataattcgtttttatttgcgttttttcgtatttatttcgttatatgggtttttgatattttttttataggcgatggtttggtcgttggggtttagttggttcgttatttttttagtttgtatttttttcgagagtaaagagtttttgggggaaggaagggaagttaaggggggatttaatttaagatggtgttttcggcgttattgtgttcgttttgttttttttttttaatgggttttttttatattggaggttttagtattaatgagaggcggtgttcggcgttttttggttttggtatttgcggagggcggggttttttttattttttttgtttttttttgagttttttttcggttttcggtgggattgggaggaggagttggtttttgggtttagttggattttttttattttgatttgtttaatttaatttggagtgttttttaagtgtttacgatacgattggtgttattgtatgtttttttaaaaggagttttattttcgtagcgtaatagtgatgtgagattatttggtaaagattttgttaaagtttgggcggggattgtttttttttgttatttattagtttttttattgtagggtggagatatgaattttgtttttttgtggtcgagttatttgttttgtatcgttttttttttttatgttaattatataaggtttgtttaaatagcggaagggaggatattgagaagtgggaggttgagagttatgggaggtggacggcggttatatgatgtttttttttcgaaaggtgagcgttttgcgtagtgatgatttttatttattatttttgattgatggttgttgagttaggtatttataacggtgggattataatagggaaagcggagtttttttttgaggattttttaggattttatttgttatttttattttttattttattaagttattagttatattttattttttattatttattttatttttttattgttatttttagattaagaatttataagttggttttttttttttaatttttttggttttcgttattgtgattgttaattttgttgggaatttttgttttaattattttttttggtattgttttttttgttttgttatatttgtttttcgtttttatgttttgtatttgtttttttttttaggtaaaagttttttggtttagggaaagtgggaattggggatggaaaagaggtcgtgattaagttttgtttttttttttttttttttagtttttttgttagaaatagtatttttgtttttttttgttgttttttaattttttattttttattttttgtttttatttattttgcgagaatttatttagatttttttttttttttttttttgtcggtttagttatggtag

SEQ ID NO: 105 - DNA, 3001 bp, Artificial Sequence
  chemically treated genomic DNA (Homo sapiens)
gaagatgagggtttttggaaatttgagggaacgataaagattattttatttgggaagatcggtaggagtttttatgggggtttagaggggttgatatttatttttacgtttagggagttgtcgttaaattaaataagggaggatataagagggtaggagtgtgagaaaggatgagaaagtaggggtgattttagatgagttatggtttgtgaatgggtttaggttttgggtttattttttatttattaagggttagagaaaggttggggatataatatcgggatattttgtttcgggtaacggaagagttgcgtttgtttttcggttattttatttaggttagaatataaggtgttgtttgtaagaaatgttgagcgtcggggggtcgttcggtggttttagtttatagatcgtatataagttttcgttttattttttattggtttcgttcggttagatttatcgttcgtttatttgaaaagtgatataattagggcgttttagttttttttttttcgatttcggaataattcgacgttttagtagggagtagagtttttttttgatttttgtattttttttaatgtataacgagttttttgtttcgtttttttttagatggcggatttcgtatttgtttagattttttttttaggttttcgtttttttttcgcgtgttttagggatagtttgttatagttttttttttttttcggtgttttattttgtagattttagtttttcgggttaagtaggttgtcggtgaagaaacgcgtcgggttagtaatttcgttgagtagtattagtttcgttattttttttttttattttttaattaggagacggtttttaaggttcgtttttttttattattaattaattagttgatttttttaaaaaagggggcgtttcggaagttttatcgattagtaagagatttgggtgttgagtacgtgaattaatagatgcggatgattgtgtaggcgggtttaatgggagtatagtagtaggaagtaatttttagatagtgttatatcgttaagcgtatgcgttaaataggttttagtgataaagcgtttgggagatgtagtatttagtattaaggtttattattttttttagttattattaagtttagtttagatagtttttatgtgttttcggagatagataagttttttaaaaggggcgtattgtgattattgttattttttttaggaagttaaaagttgagaatgggatatgggttgaaattttttttttggttttttatttttaaattttatagtatagattataatttataagtttttgttttttttaaggtttaatttttaattagttaaatattttgcgtagattttgagttagttttgtattttggttttttttttgaatgattattttttttagttttttttgggttgttcggtttttgggatttatcgttagtatttttttgaggttagtagttgttttttttaggtttttaagggtagtttgggtaattttttttcggtataaggtttttaaatggttaggttttcgttttaatattcggttatagttttgggttgttaattgaggttgttttagtaataattgataggtagttagattggtatgaaggatagttcgttttggagggttaggtgggggtaaagttaggagtagtcgaagagttcgtttatagtatcgggtagtttttttagggtttttagttcgaaatagttttgtgttttttgtacgtttttttttggttagggtttttttttcgttagtttttagtttttaggagtttcggttttgagtgaaggatgttagtgtgagtttgataggaggtttagagtgtttaggtagttgaagttttgtttttttattttgatatatggattttaagtatttttttatgagttttttttaagttttttttttttatggttttacgtttatagttagttttgtttagttttttggcggttttgattcgaaaggaaattttaaagttagtattcggtagtaggagtttagtttgggtttgtttaagttatggttacggattacgatttttttgataaagtttttatcggggtagtattagagattagaagtttgaagggtttttggtatttgattggttgatttatgagatttatgagagttttttttaagtttagtaattagttttttagttttttgagtatgttttagaatttggttggttggatttgggtttatttttagtttaagcgtttcggtaggagggtttcggggttgttgtttaatttgaataattgaattaaggttttttcgaaggttttttttttatttttgttgcggttgagaggtgtttttttttttaattgtattgattggtggcgtttttatatggatgtttagttttttttacggtgagtgaatagttttggttagaaagggatgaattaggtttaggttagtatttgaaaagaaaattaaataatgttaatagtagggtttttatttagatttttttttcgtttttttttatttttttgagatttaggtttttagttttgaaagtttttagttttgtttttttttaaaaatttgttttagttttttcgttttatttatatataatttagaattataaattttataattttttgcggttaaggtagtcgcgttaattacggatattcggtcgggttaataagtatttgcgcggttaaagtgtttggtatggtgataggaggagtcgggttattcgaattatttttttttttaaagttaaatggttattgaatgttgttttcggagttttgttttacgcggagagggtagtcggagaggggcgcggtgcgggaggcgggggtagggggcggaataattgggaaagatattgataattaattttggagttcgcgagatttcgaatttagttaaatttttggtagttaatcgggagaagggaggaatttggttagttcgtttattgaacgtgatattatttttttcg

SEQ ID NO: 106 - DNA, 3001 bp, Artificial Sequence
  chemically treated genomic DNA (Homo sapiens)
cggaggaaatgatgttacgtttaataggcgggttaattagattttttttttttttcgattggttgttaggaatttgattagattcggagtttcgcgggttttagggttagttgttagtattttttttagttgtttcgttttttattttcgtttttcgtatcgcgttttttttcggttgtttttttcgcgtggggtaaggtttcgagggtagtatttagtagttatttagttttggaaggagaggtgattcgaatggttcggttttttttgttattatgttaggtattttggtcgcgtaggtatttattgattcgatcgggtgttcgtagttggcgcggttattttaatcgtagggaattgtggaatttatagttttaaattatatgtgggtggaacggggaagttggagtagatttttggaggaaagtaaaattggggatttttaggattaggggtttgggttttagaagaatgggaaaggacgagaaaggagtttaaataagaattttgttattagtattgtttggttttttttttaggtgttgatttgaatttggtttatttttttttgattaaaattgtttatttatcgtggaagggattaagtatttatatggagacgttattagttaatataattggagaaaaggatattttttagtcgtaataagagtgggaaaagaattttcgggagaattttgatttagttatttagattaggtagtagtttcgagatttttttatcgaaacgtttgagttggaagtaagtttagatttagttagttaaattttagagtatatttaaggagttgaaaaattggttgttgaatttgaaggagatttttataagttttatggattaattagttagatgttagaggttttttaagtttttgatttttggtattgtttcgatgggagttttgttaagaagatcgtaattcgtggttatggtttggataaatttaaattaggtttttgttgtcgggtattggttttggggttttttttcggattagggtcgttagagggttggatagagttaattatgggcgtagggttatggagggaggaaatttggggggagtttatagagaaatgtttggagtttatgtgttaaggtgaggaagtagagttttagttgtttgggtattttggattttttgttaggtttatattggtattttttatttaaggtcgagatttttgggagttggagattagcgagaaggaagttttggttagggaagaacgtgtaaggggtatagaattatttcgagttgggaattttgaaggagttgttcgatgttatggacgggtttttcggttgtttttgattttatttttatttggttttttagaacgaattgttttttatgttaatttggttgtttgttagttgttgttagggtagttttagttggtagtttagagttgtgatcgggtgttggagcgggagtttggttatttaaaggttttatatcgaaggggggttgtttaggttgtttttgggaatttggaaaaagtaattgttgattttaagaaggtgttggcgatagattttaaaaatcgggtagtttaggaggaattggggaaggtggttatttaggggaagaattaggatgtagggttggtttagggtttgcgtaagatgtttggttgattaaaagttaaattttaaaagagataggaatttgtgaattgtggtttgtgttgtgagatttgggggtggggggttagagggaaggttttagtttatattttatttttagtttttggttttttaggggaggtagtagtggttatagtgcgttttttttgaggggtttatttattttcgaggatatatagaagttgtttaaattaaatttagtagtggttgggggagatggtggattttaatattgggtattatattttttaggcgttttattattggagtttgtttggcgtatgcgtttggcggtatggtattgtttggaagttattttttgttgttgtgtttttattgggttcgtttatatagttattcgtatttgttgatttacgtgtttagtatttaggttttttattggtcggtagagttttcgggacgtttttttttttgaaagagttaattgattagttggtgatggggagaggcgggttttgggaatcgttttttggttggggggtgggggggaaagatggcggagttgatgttgtttagcgagattgttgattcgacgcgtttttttatcgataatttgtttagttcggaggattggggtttgtagagtgaggtatcggggaggggagagggttgtggtaaattgtttttgaggtacgcgggaaagaagcgggggtttaaagaggaagtttgggtaaatacggaattcgttatttgaaggagagcggagtagggggttcgttgtgtattaagggggatataaaagttagggaagaattttgttttttgttggaacgtcgagttgtttcggggtcggggaaggaggggttgaagcgttttggttgtattattttttaagtgggcgggcggtgggtttggtcgagcggagttaatgagggatggggcgggggtttgtgtgcgatttgtaggttggggttatcgaacgatttttcgacgtttagtattttttgtagatagtattttgtattttggtttagatgaagtggtcgaggagtagacgtagttttttcgttgttcggagtaggatgtttcggtattgtgtttttagtttttttttaatttttggtgggtggaaagtgagtttagaatttggatttatttataggttataatttatttggagttatttttatttttttatttttttttatatttttgtttttttgtatttttttttatttagtttgacggtagttttttggacgtggggatggatgttagtttttttgagtttttatgggaatttttgtcgatttttttaggtaaggtagtttttgtcgtttttttagatttttagaaatttttattttt

SEQ ID NO: 107 - DNA, 5477 bp, Artificial Sequence
  chemically treated genomic DNA (Homo sapiens)
tataaggattgtgggttttttaggggtttcgtgttaggagttagaaggggtatagattgtttttttttaatagttgtattatttgtttagagttagattgagtttggagggttttggaagttagaaggattgatatggggttggaggtagggaaaggttgttggaagagggagaaattgaggatttacggtttttaggtagtttgatttgttttaggtttggttggggtttgttttcgttataggtggttacggtttttttgtaagaattgttggggtttttattatagttgtagtatcgtattcggttttttggtaggagaaaagaggcgttggatttgggttttcggtggagtcggttggtagaaggtttgtgtgagaagttagttggtcgtttttttatttaaggtagtttttagtagggagttgagtaagattttaataaattggggttttatcgtagtttgttcgtgttaggatcgtttttattttttgtttatttttttttttagttcggttttgtttgttttatatttttcgtgttttgagttttatagggttataaaaaaggaagaaagagttttttttagtaggtattaagggttttagtggggatagggaggggttttatagtatgtttttagtattttttggagtttttaaatttttttatttttagtagtagtttgtggattaataagaatttttgaggatttttgatatttttttatagggtttttgagggttttttttttgtaattatttgtgtaaggttagattttttttatatattggattttaacgaaaataatatattttaatagattgaatgtagaagtagataggaaaatttaggtattttttacgaagtttgatattagatttataaaaatgtaaagtaatgtttagttttttattgtgttgtggagaaataatagttattttttataaaattgtattttgttagtatgtaatattttattatttttattgtttaaataaattaataaatatttattttaaattttttgttttaatttttaatgtagtaaatattgatataattttataaagaaaagttttttagagttttaagtaattttgaaaagtgtaaagaggttttgagattaatatttttgaaaagagttgtttttttgggtatttgtgttttttttatttttattttttgtttttagttttattttttttggtatatgttggttttgattttttagatgggttttttttttttttagtttttttaattttagttttttaggttgtattattatttttttattttaaattttatttatgtttttttttttagtgatttttttttagtgtaagtatattagtaggttttttagttttattcgtggttattttttttttttaaggtagtaaagttggtagggataattatagggtaggaatgttgaagtttggggggattaaagggatttgaagttgggtggggttcgtttttatatagttgggttttgtgtgtgtatgtgggtgtgtgggtgggggtattgttgattttatatttaaatagatttacgtcggggttgtttaggagggtgattttgagagatatgaaagtattgagggggaaagatagagaaaataaagatagagagaagttgagagagttagggagtagtttgagatatggggagggagggggaggagtaggagggaaggcgatagatataatttaggagtaggagaggaagttaagttatagagataatatgttgagagagtagaggagattttttaggtaagggtagattttttgtaggggtaggttgggggttttcgttgtttgttgggttaggttggtgaatttggttatggtttcgttttttagatttattttttaggtgtgtttgtttattggttttttattgttttgtttaaatgttttaattttataaatttcgggatttcggggtgtagattattttttttagatttttgagtttgtgtttggttatgggtatttttagtatttttttttgcgtgttgtttttttgtggggtattgggtaagggtgggttggggaatttttagtggttagggggttgggggtggggataagggtatgtggaggaatttgagggttggggaggagaggggtgtgggtgttggaagaggttaagaagagagttgggggagtgggggattttagggagattagttattgggaaggttagtttgatgaggtgggaaaggaagagtttttttttaaggtatttgagaataattgttttttttttgttgtatttttgattcgtttttgttttttttattttttattttacgtgttgtttttgtgttgggttttttggttaatgttaatttttatttttttatttgtttttggtgttatttatttaatttttttattgatttttttaatttttttgttgttgggtttggttttttgttttattttttttatgttggtttttgatttttgtggtttttgtttatgtttgcgtattttttaatttttgtattttttttgtttttatttttgtttttttttttgtatcgtttttttttttttttttgagatagagtttcgttttgttatttaggttggagtgtagtggtatgatttcggtttattgtaattttagttatttagatttaagagatttttttgttttagttttttaagtagttgggattagaggtatgtgttattatgttcggttaattttttgtatttttagtagagacggggttttattgtgttagttaggatggttttaattttttgattttatgattagttcgtttcggttttttaacgtgttgggattataggcgtgagttattgcgtttagttattttttttatttttgttagttttttttttttattttatagtttttttttttttgttttatgtgttatttttttttgtgattttttttcggatttggtttttgtttgttttatagggagggtttgttttttttgtttttttaatttttgttgttttaataggttttattatgttttttgttcggggaaggtttcgttgttatatttgtggttttattaaattttgttattttgtttttatcgagtgtcgggacgatgaagtttgtggtattagtattggtattttaggtaggattttggtttaatggtttttttttaggaggttttttatttttatttattcggttttttttgtggttttcgttttagtatgttttttttattttatagattagagtgagattattgagtgaaaaagttgttttttaagggtttagtgttttttgttaggttatgttatttattggttgtatttttatattttgtggtattattgttgcgagtaggatttgtgtaatatagtcgtttttttatagtagtttattagttttttcgtttttttgtttttttttgtggttagtttcgttgggagaggatattttttttattagttttcgtggatttgtagtttttaatttaggatatttttcgttattattgcggttttggaaatatttgtatagatattttgagatatgttcgagaatttaattttgtatagagattttagattttttagtagattttttatagattttttataaggtttggggaggtatttgtttagagtttaattttataaagaatatttattttgcgttttttgttttttttagatgtttattgttgatgtttcgtgttagtttaggttattggtaaggtaggtattttgatgatattgtggattttaggtaaggggattaaaggagtattaggtatggtaaggaggagagttttgttaggaaagattaatgtggtaggtcgggaatttaggatggagggtttgggggattatgaagagtatttttaataaaaggtttatttaggagtttagtaatattgtagatattgtagtgtgtgtgtgtgtgtgtgtgtgtgtgtgtgtgtgtgtgtttgtgtgtgtgtgttttaagagtaaattgtagttgtttggtgggttgggttggagttggaatttggattacggtattttttttattttttatttgtgttattttcgtttttttttttgttaatggtttagtttaagtttttgtagtttgaaggttttaggtgagatttttgagaaagtttttttttagtaaggtttaagtttgagtagagatataaaagggtatttagtggagttgtttgtgagggtgtggttggagtttagtttatttttgtttgagattagggaatggttaagttgggagtattaatattttttttcgttttattagtttagattcgtttatggtttatagatattttagtatggtttcggtttaataaataatatatttttattgggtttgttagtttgagtagatattttttttgttttcgagaaatagggtgtgattttagggtagtaggaaggaagtgttagagtggcgatagttgtttatatgttttgaatgtttcggtaaggcgttatagggaagagtgtgtgtttaggataaggaaggataaggagggggtttcgggtgggagttgagtataggtatttttattttgatttagttttttttttttgtatgtgaggaagtttggggttgattaaatatgtttgtttttttttttttttgtgaggatgagatatggggtagtgggggtttggtttaatttagagatgggttgaggttttttattttttttgtttttttatttttttattttgtgtttttatttttttttttttgtttatttttttttattttttttgatttgagttttttttttttttttttttttttcgttttttttatttgttttttagttttattgtaatggattttttattattgtttaagtttttagatttttgttttttttttgtgtatatttattttttttgtttttattagtaattttaggttttttttaattttatagtattatgggtttagggttatttttttattgttgttataagataggagattaaatttttttgtaggttatattatagaataatgtttttttttttttttagttttttatttttttttatatatagtttggtggttgttggaggttagttggatggtgaagtcgaatttttagtttcgttttttttgttaaggttgtcgaggaattttttaggtgttagatggttagcgagatagtaggttatattttttagtagatgttattaaaattatttgggtttgtgggtaggtgggttgtggggttttttagagagatagattaaggatatttttattttttatatttttaggaacgagggtttatttttaatttaattcgtgttttttttttatttttagttttttttaggatttaagtttttgttttttagttgttttttatttaagacgggttaaatggatgtttttatagatttggatttcgggtttgaattgaggaatcgaggtatttggggagaaggag

SEQ ID NO: 108 - DNA, 5477 bp, Artificial Sequence
  chemically treated genomic DNA (Homo sapiens)
ttttttttttttagatgtttcgattttttagtttaaattcgaaatttaggtttatgagaatatttatttggttcgttttgggtgaggaatagttagggaatagaggtttaaattttggaggggattggggatggagaggaaatacgggttgggttggggatgggttttcgtttttgaggatgtgaaaagtagaggtatttttaatttgtttttttggaaaattttatagtttatttgtttataagtttaggtgattttggtgatatttgttgggaagtgtgatttgttgtttcgttggttatttggtatttggaagatttttcgataattttagtaaggggggcgggattgagagttcgattttattatttagttggtttttagtagttattaagttgtgtatggggaggggtgggggattgaaggaaaggaggagtattattttgtgatgtaatttataaaaaggtttggttttttgttttgtagtagtagtggagggatggttttgagtttatagtattgtggggttgaggggagtttgaggttgttggtgggggtaaggaggatgggtgtgtatagggaggagataggaatttggagatttgagtaatggtggggaatttattgtagtggagttgaaggataaatggggaaaacgggggaagagagagaagggaagagatttaagttagagaaagtggaaagagatggatagagggagaaaaatagaagtataaagtgggaggatggagggatagagaaaatggaaagttttaatttatttttaaattaagttagatttttattattttatgttttatttttataaagaagagagggaataggtatatttaattaattttagatttttttatatgtaaggggagggaattgagttaggatagagatgtttgtgtttagtttttattcggggttttttttttatttttttttattttaggtatatatttttttttgtggcgttttatcggggtatttagagtatgtgagtagttatcgttattttggtattttttttttgttgttttgaggttatattttatttttcgggggtagagggagtgtttatttaggttggtaggtttagtgggggtatgttatttattgggtcggggttatgttgggatgtttgtgaattatgggcgagtttgggttggtgaagcgagggagggtattgatgtttttaatttggttattttttagttttaggtagaaatgagttgagttttagttatatttttataagtagttttattgggtgtttttttgtgtttttgtttaagtttgggttttattggaaaaaagtttttttagaagttttatttaaagtttttaggttgtaggggtttaaattaagttattggtaagaaaaaggacgaaaatgatatagatggagaatgaggggagtgtcgtggtttaggttttagttttagtttaatttattaagtagttatagtttgtttttagagtatatatatatagatatatatatatatatatatatatatatatatatatatattgtagtatttgtagtattattggatttttagatagattttttattaaaggtattttttatagttttttaagttttttattttgagttttcgatttattatattagttttttttagtaagatttttttttttattatatttgatgtttttttgatttttttgtttgagatttatagtgttattaaaatgtttgttttgttagtgatttgggttgatacggggtattagtaatgggtatttagaaaagataaaagacgtagaataggtgttttttatgaggttggattttgggtaggtgtttttttaggttttgtgaggggtttgtgaggggtttgttgagagatttggggtttttgtataaaattaggttttcgggtatgttttaaagtgtttgtgtaggtgtttttagggtcgtagtgatggcggggggtattttgggttgggggttgtagatttacggaagttagtggaggaggtgtttttttttagcgaagttggttataaagaggggtagggaggcgaggaggttggtgagttgttgtggggaagcggttatgttgtataggttttgttcgtagtagtggtgttatagagtgtaggagtgtagttagtaggtggtatagtttggtagagggtattgggtttttgagaggtagtttttttatttagtgattttattttggtttgtgggatgaaagaggtatgttgaggcgggggttataggaaaggtcggatggatggaggtagggagttttttggagaagggttattggattagagttttatttgaagtgttaatattgatgttataagttttatcgtttcgatattcggtgggaatagggtggtagggtttggtgaagttatagatgtagtagcggagtttttttcgggtaggggatatggtgagatttgttgaggtagtagagattaggagagtaggagaggtaaattttttttgtggggtaggtagaggttagattcggagagggattatagagagaggtgatatatgaagtagagagaggaaagttgtggaataagggaggaaagttgatagaagtagaaaaaatagttgggcgtagtggtttacgtttgtaattttagtacgttgggaggtcgaggcgggttgattatgaggttagaagattgagattattttggttaatatagtgaaatttcgtttttattaaaaatataaaaaattagtcgggtatggtggtatatgtttttagttttagttatttgggaggttgaggtaggagaattttttgaatttgggtggttgaggttgtagtgagtcgagattatgttattgtattttagtttgggtgatagaacgagattttgttttaaaaaaaaagagggagacgatgtaggaaaagaaatagagatggaggtaagaggggtatagggattgagagatgcgtagatatgaatagaagttataagaattagagattaatataaaaagagtgagataaaaagttagatttagtagtaggaaagttgagggggttagtgaaaaagttaagtaaatggtattagagatagataggaaaatagaaattgatattgattaaagggtttagtatagaagtaatacgtgaaataagggataggggagataggggcggattaaagatgtagtaagggggagatagttatttttaaatgttttgaaaggaaatttttttttttttattttattaggttggtttttttagtggttggtttttttgaagttttttatttttttagttttttttttggttttttttagtatttatattttttttttttttagtttttaggtttttttatatgtttttgtttttatttttagttttttgattattgaaggttttttagtttatttttatttagtgttttatagaggaatagtacgtagaggaagatgttggaggtgtttatggttagatataggtttaggaatttgggagaggtgatttgtatttcgagatttcgggatttgtagagttggagtatttgagtaagatagtgaggaattagtaaataaatatatttagggagtgaatttggggggcggaattatgattagatttattagtttgatttagtaggtagcgggggtttttagtttgtttttgtaaggagtttgtttttgtttggagggttttttttgtttttttagtatgttgtttttgtaatttagtttttttttttgtttttgagttgtgtttgtcgtttttttttttatttttttttttttttttttatgttttaagttgttttttggtttttttagtttttttttgtttttgttttttttgttttttttttttagtgtttttatgttttttaaagttatttttttaaatagtttcggcgtggatttgtttgagtgtagaattaataatatttttatttatatatttatatgtatatataaagtttagttgtgtaagggcggattttatttagttttagatttttttgatttttttaagttttaatatttttattttgtaattatttttgttagttttattattttggaggaaagaaataattacgggtggggttggagggtttgttgatgtgtttgtattggggagaaattattagaaaggaaggtatggatgggatttggggtaggggggtggtgatatagtttggaaggttggggttgaagagattgggaaggaggaaggtttatttggggaattagagttagtatgtattaggaggagtaagattaggaatagggagtgaagataggggagatataggtgtttaggagagtagttttttttaaaaatattgattttaggatttttttatattttttaaagttatttaagattttgaagagtttttttttatgaggttatattaatatttattatattaaaaattaaaatagaaaatttaaagtaggtatttattgatttatttaaataataaaaataataaagtattatatgttaataaaatatagttttgtgaaaaataattattatttttttatagtatagtgagaagttgagtattgttttatatttttgtgaatttagtgttaggtttcgtgggagatgtttgggtttttttatttgtttttgtatttagtttgttgggatatgttgttttcgttgaagtttagtatatgaagaaaatttgattttatatagatagttgtaaaaggaggatttttaaggattttgtgaaagggtattagggatttttaggggtttttgttggtttatagattgttgttgaggataaaggagtttgaggattttagaggatgttgagagtatgttgtggggtttttttttgtttttattggggtttttggtgtttgttgggggagatttttttttttttttttatagttttataaagtttaaggtacgggggatataaggtaggtagagtcgggttggggaggggggtgggtaggaggtagaggcggttttgatacgggtagattgcgatgaaattttagtttgttgggattttgtttagttttttgttaggggttgttttgggtaaggaggcggttagttagttttttatataggttttttgttagtcggttttatcgagggtttaggtttagcgtttttttttttttgttaggaaatcgaatgcggtgttataattgtggtggaagttttagtagtttttgtaaagaggtcgtgattatttgtggcgagggtagattttagttaggtttggaatagattaagttatttggaaatcgtgagtttttagttttttttttttttagtagtttttttttgtttttagttttatgttaatttttttggtttttagaattttttaggtttagtttggttttgggtagatggtgtagttgttagaggagagtagtttgtattttttttggtttttggtacggagtttttgagaggtttatagtttttgtg

SEQ ID NO: 109 - DNA, 3001 bp, Artificial Sequence
  chemically treated genomic DNA (Homo sapiens)
ggatttttgatttggtatttattaggattgaaattatttttttgtttgggttgatcgtaggggatgtcgttgattttattttcgtagcgttaggaggtattatgattatcgttgaggagatagaagatttcgtttcgttttagcgttttatggttatatacgatgaggcggttttttcgtggttttcgttgtttttgtgggaaagggaattgggtgttatagaaggagattttaggggtttagaggtagggatagagaatttattattttttaaatgtaattatatgtatggtttttttgagtttagtttttgtttattgagggttttagttagattttataaatatatattttgtttgaattaagaagtttttttagggtgtatagttggatatgtgtattaggggtttagttatagggtgtatgagagtttaaatttaatttgtgtttattcgttaagttgtgtattttggtataggtttgtgtttgtttaaagaggtagtgtttttttttattttgtatgagggtattgtatggattaacgtagttttgttgataatgttaaatgggaagttaatggtagagttttttttttttttgataatgtgtttttattaggatgttttgttttttaaggaattttatttaagttagaaaatttgattttagagaattttttttttggaaaggagtttatttgggggtattttttagattttttataaggtagttttttttatttattttttaggatagagatttgaatattagagttcggtttaggggtaaatattttagtgttaatatttagggagagatttcggggtgtgttttaggaaatattattatttttgttttatattaatatggtagaggttatttggtagtcggttttgtgagtataaagggagtagaaaagaaatattatttttgttttaatatcgtttattattgttttaaggtttagtttatcggggatatttttattattgataatgaacgttgtaggagattatgtgttgtttgaaaaaaattggaggaagaaatttagagtgagtattttgtaggtattttttttattatttttcgttaattttttattttttgttagggattttaggtttttcgatggttttagggtgtaatttaatatttgtattatttatattttttgttttgttttatttttttttattgtatttattattttgtaatagataaaaaagtttatttgtttattatgtttgtttgtttttttttagtataatttaaattttgagggtagagatttttgatttgttttgttcgtggttatatttatgaaatttaaaatagtgtttggtataggtatatagtatttaataaatgtttgttaagtgaatgtttaattttttggtgattttaatttttagattattgttttagatatttgtttttttcgggttttttttattttttagggatttaggtaattaattttttaagtttttttatttttagggtttttgggtttattgggttgtttatttatttaatttagtatcggtttttttatttagatatttttatattttggtttatggattttcgtagggcgatgaatttggtttttttatcggatgaggatatttttttcgttttagtaaaggcgagaagagtgtttcgcggagtggttgtgatgagcgggatgcggaaggtgtttattgagtcgatttgtttttcgtttatttatagtagttgttttatggttattagcggttgtatttgttatgggaggaggaagggttaataaagataaatttgttttgggggttttaggaatttacgtttcgatgggagagggaggatttaatggggatttcgagtaggggatggggttttagaataagaaagaggaatacgaaggggagtttggagcgaagttggaggttcggagtaggggagggtttacgaaaggagaaggcgtttttagggagggaaggggattttaaaagaggaaggggttcgaatgaggagaaggacggggattcggagagggagaggggttgggagcggtaggaggaaacggggtttgggagaaagaaaagggttttgtcgcggaaagtcggtttagtcgttcgcgtttcgggggatattaggtgtcgattatttgcgcgggtcggggatggggttatgtaaagggtgatttattagatcgaagtcgtttttagttttggattaggaggttgttagagatagtagtaggaagatcgcggtaaatatttaaattttatagtttttttagaagtttagaattcgcggtttttagcgtttgttcgggagcgtcgtgttgggtcgttttttagttattttttttcgtagttgtcgcgattttggtagttagattttatagagtcgggagttagttgattcggattttttaaagcgtagatgttatttttaagttcgtttcggtttggaggtttcgtcgcgtttttcggattttaattggtttttaagtagtttatttttttttacgtgattacgtagtatttcgaagtttgttttttcgattggtttttttggaggtttttttggaggttcggagcgcgtgattcgaacgggaagcggattggttggggtgaagaagggattggtattatttttattgggttttttgattggtcgcggtattaggatacgttataggggcggggtcgattttaaagagtcgggcgcggaaaaaaaaaggtcgtttgtcgtcgtggagagaatgagttatagatttattgagttaataaaatatttttaataaaatttttttgtttgtttgttttgttttggagatagagtttgttatttaggttggagtgtagtggcgcgatttcggtttattgtaatttttgtttttcgggtttaagcgatttttttgttttagtttttcgagtagttgggatgataggtgtatgttattattttcggttaatttttgtatttttaatagagacggaggttttattat

SEQ ID NO: 110 - DNA, 3001 bp, Artificial Sequence
  chemically treated genomic DNA (Homo sapiens)
atggtgaaattttcgtttttattaaaaatataaaaattagtcgagagtggtggtatgtatttgttattttagttattcgggaggttgaggtaggagaatcgtttgaattcgggaggtagaggttgtagtgagtcgagatcgcgttattgtattttaatttgggtgatagattttgtttttaaaataaaataaataaataaaaagattttattaaagatattttgttaatttagtaaatttgtgatttattttttttacgacgataggcggttttttttttttcgcgttcggttttttaaaatcggtttcgtttttgtgacgtgttttggtgtcgcggttaattaaaaagtttaataaggatggtgttagttttttttttattttagttagttcgtttttcgttcgggttacgcgtttcgggtttttaagagggtttttaagagggttaatcggaagggtaagtttcgagatgttgcgtgattacgtgggaggagatgagttatttgaagattaattagagttcgggaagcgcggcggggtttttagatcggggcgggtttaagggtgatatttgcgttttaaagggttcgggttagttgattttcgattttgtggagtttagttgttagggtcgcggtagttgcggggagagatgattggggagcgatttagtacggcgttttcggatagacgttgggggtcgcggattttgggtttttggggaggttgtagggtttgggtgtttgtcgcgatttttttgttgttgtttttggtagttttttggtttaaggttgagaacgatttcggtttggtgagttattttttgtatagttttattttcgattcgcgtaggtgatcgatatttagtgtttttcggaacgcgggcggttgagtcgatttttcgcgataggattttttttttttttttagatttcgtttttttttatcgtttttagttttttttttttttcgggttttcgtttttttttttattcgagttttttttttttttggggtttttttttttttttgaaggcgtttttttttttcgtagatttttttttgtttcgagtttttagtttcgttttaaattttttttcgtgttttttttttttgttttgggattttattttttattcgggatttttattagatttttttttttttatcggaacgtgggtttttaaaatttttaagataagtttgtttttgttgattttttttttttttatgataggtgtagtcgttggtgattatggagtaattgttgtgggtgagcgggagatagatcggtttagtggatatttttcgtatttcgtttattatagttatttcgcggggtatttttttcgtttttgttgaggcgaggaaaatgtttttattcgatgagggggttaagtttatcgttttgcggaggtttatggattagggtataaagatgtttgggtgaaagagtcggtgttaggttggatgggtgggtagtttaatgagtttaagggttttgaggataggggaatttagagggttggttgtttgagtttttgaggggtagagggaattcgagaagggtaagtgtttaggatagtgatttggaaattgggattattaaggagttggatatttatttagtaaatatttattgggtattatatatttatattaggtattattttaggttttatgaatatagttacgaataaaatagattaaaaatttttgtttttaggatttaaattgtattggaaggagatagataagtataataaataagtaaatttttttgtttgttgtaaggtgataaatgtaatggagaaaaataaaataggataagaggtatagatagtgtaagtgttggattgtattttgggattatcggaaggtttgaggtttttagtagaaggtgggaaattaacgggaagtggtagaaagggtatttgtagagtgtttattttgggtttttttttttaattttttttaggtagtatatggttttttatagcgtttattgttaatgatggggatgttttcgatgggttgaattttggggtagtagtgagcgatgttgagataggagtagtattttttttttattttttttgtgtttataaggtcggttgttaggtggtttttattatgttggtatggagtaaggatgatggtgttttttggagtatatttcggaatttttttttggatattggtattgaagtgtttgtttttggatcgggttttggtatttaggtttttgttttaggagataggtggagggggttgttttgtggagagtttgagggatatttttaaatggatttttttttaaggggaagattttttgaagttagattttttggtttgggtgggattttttgaaagatagggtattttggtaggaatatattattaggagaagagggaattttgttattggttttttatttggtattgttaataggattgcgttagtttatgtaatatttttatgtaaagtagaaaaaggtattgtttttttggatagatataagtttgtgttagggtgtatagtttggcgagtgagtataggttgggtttaagtttttatgtattttgtggttgggtttttggtgtatatgtttagttgtatattttgggagagttttttaatttaaatagggtgtgtatttatgggatttgattggaatttttagtgagtaagggttgaatttaaggggattatatatgtgattgtatttgggaagtggtgggttttttgtttttgtttttgagtttttagagtttttttttgtgatatttagtttttttttttatagaaatagcgggagttacggaagggtcgttttatcgtgtgtggttatgggacgttggagcgggacggagttttttgtttttttagcgatgattatggtgttttttggcgttacggaagtggggttagcggtattttttacggttagtttaagtaggaaaatgattttaattttgatgaatgttaggttaggagttt

SEQ ID NO: 111 - DNA, 3001 bp, Artificial Sequence
  chemically treated genomic DNA (Homo sapiens)
ttttcgtttgattgggtgggtagagggagggtcggtatcgttgatggttttgttgcggttggagcgttttattaggatgtttagatgggttttgattgcggcgatgtcggttagtttattttgcgggttaaagcgggtaaagttattaaatttaggtagacgttatacggtttcgtttttttttaggtttatagagaatagttgttttttattaaatttatgggtgaattggttcgaggcgtcgtaagattggtagaaggcgggttcgtaggagtttatgtggttagttgtgtttggcgagtttagggttaaggagagagaaaaaaatgtgtttgttttatttataatatgtgattgttgagtttttgagtttgggtttcgttttgggttttgtgtggggatagagttttgttttgatattgggttggttttgggagagagaaagggagagagaataggaagaaagaggtttattttagtatattgtagtcggtatagagatagtgtagtttggtatattaggatgggaagaggagggattgtttaaaattatgtttggggttttagaatttaaattttggttgtggttatttgttttggttgtgttgttaggttttgtgttgtgagttggtgggattgtgggggtgggatgaggaggaatgattaaggataggagagtatggagttttgtatagagatgtagtgtaggtgggtgtgaggggaaataggttacggttggtaggggtaagaattaaggttagtgatttagagattaaggggatagggagaggtaatttaaggtattataaagagtattggacgaggagttagaagttaaggtttatgttttaatttttttattttagagtattatgattgagtgtggtttttttataattgttgtttagttttttggaagttagggattaagttttaatttttgtagaattttatgaagttgtttgagtaatagttattgaggaattagtatgtatttagtataatggggggttagggaaataaaagaaaaaaaagatgaattatttgtagattcgtattttagtttatgtttttcgaagaataaagataggtaaatagttaattatcggtatgggtataaatattgtaatagaattggatttgatcgggtatattttaggttaggggtggtagagaaattagggtgtttgttggtatttgttgggtggaggtttgggttttaggaaggaggaaggaatgaggagaaatttgaacgttagtaaaggttgattggggtatttgcgtagttgatcgagttgtatttttatttaggtttagagtggatgtgatagagatgagggggattgggtgttttttggtgaaggaagttgtttataaattagagagcgagaggaataagtattttttatgttatttttttatgtaatttaatttcgtaaatttttgtttttcgtcgtatttttttcgttttcgtatttatttttggtggtttttgttttttgcgggtttaggagggttattagggtgtggaattttaggattagttttgttttgagggttattatattttggtgttttaattaaattagttttagttcgtgtggtgaggataggaataaggcggaggtaaagaagaagaaaatagattcgaggatgggggcgattttttttgtttttagttaattatagaaattttttgagtgaatgtatttgttgttgggtaaagagggaaagagtcggggtgagaaggtggaaggatttattgggtttttaggagaggttaaaggaagttttggaggatgggaggggtttggattaattattattacgttttttaagaagggattttttgaagagagagaaaaggtcgttagagtatcgcgtagttgagttttaataaattttttttttatgtttatttgcgatgtagggaattttatttttttaagaagttttcgtggataaattttgagttagaaagtaaaataaattttattaataatttttaaaaggaaaatattggttatataatggaataaaaattttttaaaattttaaattatttttaaaaatgttattttattttttttttattattatttaattttattgtgtaagaaaaaatgtgtaattgttggagttgtttggtttaaagtaaagtgtaaagagttttcgtggatttttcgaggagggtagaggtgttggttttttttgttggtttttttaggattcgggtattttttttaggttgatataggttggaggacggtattatttttgtttttggtttttggttgggttcggttaataagaggtattgggagaatttagtttagtatatatatttaaaaaataaaataaaataaaataataataacgtaaagttaacgtttgtgtaaagagaaatttaattaaattaggttatgtgttaaagattatgaaatcgatgatttttaatttggagggagttaggaaattatgcgggtttttggttttaaatgagaattatttggggggttcgttataatacgtgtttttgagttttttttttatttaatgggttagattagtttttttaaggtagggttagggaatttgtgtttttagtatgttttttaggtggttttcgggtagtttgtggattggtaaaatttgttttaatgttttttttttaatgaataagggatgtttattttaagtggggtagatatagtttttgattttaaattaattaaatgatagttagtaattgatttgtatggttcggtttatggggagttttaattttagttttttcgtttttagtttatagtgtttacgtaatgtttagtatattataggcgtttaggagatatttgcgtatgaatgaatagtgtttttattgttttggttttgttttggttaggatttttgttatttttatttttttttaagtgaggtgggagttggagttatgagatgaaagacgggaaagttatgaaaaatttatgataaagaatgt

SEQ ID NO: 112 - DNA, 3001 bp, Artificial Sequence
  chemically treated genomic DNA (Homo sapiens)
atattttttattatgagttttttatggttttttcgttttttattttatggttttagtttttattttatttggggggaggtgaaggtggtaagggttttaattagggtaggattaaagtagtgaagatattgtttatttatgcgtaggtgttttttaggcgtttatgatgtgttaggtattacgtagatattgtggattagaaacgaaaaaattaagattagggttttttataaatcgggttatgtaaattaattattagttgttatttgattaatttgaagttagaagttgtgtttgttttatttaaaataggtattttttatttattgaggaaagagtattggagtaggttttattagtttatagattattcgagaattatttggggagtatgttgaaaatataggttttttggttttgttttggaaaggttaatttaatttattaagtaaagaggaaatttaggaatacgtattataacgaattttttaggtgatttttatttggaattagagattcgtatgattttttagttttttttaagttgaaaattatcgattttatggtttttgatatatggtttaatttggttagatttttttttatatagacgttagttttacgttgttgttgttttgttttgttttgttttttaaatatatatattggattaaatttttttagtgttttttattagtcgagtttaattagaagttaaaggtaagggtgatgtcgttttttagtttgtgttagtttggaggaggtgttcgggttttggagggattaatagagaggattagtatttttgtttttttcggggagtttacgggagttttttatattttgttttagattaaataattttaataattatatatttttttttatataatgaaattaaataataataaaagaaaaataaaataatatttttgaaagtgatttaaagttttaagaggtttttattttattgtgtagttaatgttttttttttaaagattattggtaaagtttattttattttttaatttaaaatttgtttacggaaattttttgggaaagtaggattttttgtatcgtagatggatatagagagaggatttgttggagtttagttgcgcggtgttttgacggttttttttttttttttagggggtttttttttggaggacgtggtaatagttggtttaagttttttttattttttaaaattttttttggttttttttgggggtttagtgaatttttttatttttttatttcggttttttttttttttatttagtaatagatatatttatttagagaatttttgtgattggttgaagatagaaggggtcgtttttattttcgaatttgttttttttttttttattttcgttttgtttttgtttttattatacggattgagattgatttgattaaagtattagagtgtaatggtttttagagtagggttggttttggggttttatattttgatgatttttttgagttcgtaggaggtaggggttattaagggtgagtgcgagggcgaggagggtgcggcggggagtagagatttacggagttgggttatatgaggaggtggtatggaggatgtttgtttttttcgttttttggtttatgggtaattttttttattaagagatatttaattttttttatttttgttatatttattttggatttaaatgaagatgtagttcggttagttgcgtaggtgttttagttagtttttgttgacgtttagatttttttttattttttttttttttttgagatttaaatttttatttaatagatgttagtaagtattttgatttttttattatttttggtttggaatgtgttcgattaagtttagttttgttgtagtatttatgtttatgtcggtagttaattatttatttgtttttgtttttcgggagatatgagttggggtgcgggtttatagatggtttatttttttttttttttatttttttggttttttattgtgttgggtgtatgttagttttttaataattgttgtttaaataattttatagagttttataagaattaaaatttaatttttaatttttagaaaattagataatagttatggaagagttatatttagttataatgttttgagatggaggaattgggatatgaattttgatttttgatttttcgtttagtgttttttgtaatgttttgagttgtttttttttatttttttggtttttgggttattaattttaatttttatttttgttagtcgtggtttgtttttttttatatttatttgtattgtatttttgtgtaaagttttatatttttttgtttttaattatttttttttattttatttttatagttttattagtttataatatagggtttgataatatagttagggtagatgattatagttaagatttaaattttggaattttaagtatgattttaggtagttttttttttttttattttgatatgttagattgtattgtttttgtgtcgattgtagtgtgttgggatgagtttttttttttttgtttttttttttttttttttttttagggttagtttagtgttagaataggattttgtttttatatagaatttaggacggggtttaggtttagggatttaataattatatattgtggatgagatagatatatttttttttttttttttgattttgaattcgttaaatatagttgattatatgggtttttacggattcgttttttattagttttacggcgtttcgggttagtttatttatgaatttgatgaggaatagttgttttttgtggatttgaagaaaagcgaggtcgtgtggcgtttgtttgagtttggtgattttgttcgttttgattcgtagggtgggttggtcggtatcgtcgtaattaaagtttatttggatattttggtggagcgttttaatcgtagtagagttattaacggtatcggttttttttttgtttatttagttaggcgggaa

SEQ ID NO: 113 - DNA, 6944 bp, Artificial Sequence
  chemically treated genomic DNA (Homo sapiens)
gaagttttataagatcgaagtggagttattggagtgttttaggtgaagaaacgatatattttgatttatagtagtaggattattgtggagagaatatttaggtggtaggtaatggaatagtgttagagttattatttaggagtgatagagtggtggggattaagggaagaggagggtttgagggatgagagggacggagggaagggttggagaagtaggaggtgaggagaaggagtagagggatagaatttgaaagtagtagaatttttagttttaaatatattgttttataaatttttaatatatttatttatagagtttagtagggtgttttttgtatttggtttttaatattttatgtgggattgtttaaaaattaattgttttttttgtttttttttaggtttaaaaaaatattaagtgttttaataaaatatgtatattatttagatgcggatattttttaaaaataggaagtgtatgagtattggtgaggggtattgtgattgcgttgaatatttgtaattttgaggtgaatgaatgtattggtttttggttgtaatatataattatacgttgtgttattttgtattgttaggagatgttttggatttttatagaaatttagggttatggaatgaaggtaattttagaatataataagagttatagatatatagtttgggaaagtaaaatttaggagttttgagagttgtataattgtaatgtatttagatatatttatatattaaggggttaaagtaatagtttttatatataagatttttgattggtcgggcgcggtggtttatgtttgtaatcgtagtattttgggaggtcgaggcgggaggattacgaggttaggagatcgagattattttggttaatacggtgaaattcgtttttataaaaaaattagtcgggcgtggtggcgggtatttgtagttttagttattcgggaggttgaagtagaagaatggcgtgaattcgggacgtagagtttgtagtgagtcgagatcgcgttattgtattttagtttgggcggtagagagagatttcgttttaaaaaaaaaaaaaaaaaaaaaaaaaaaaaaaaaaaaaaaaaaaaggtttttgataatttaggggttattaagattttattatttattgtagttaataaaaaaaaaaaagaaagaaagaaattggtttttgttttattttatatgtttaggtataatttttttagagaagaagaggaggggggcggggaggagtaggaggaggaggaaagaaggaggagaaggagaaggagaaggagaaggagaggaagaggaagaggaagaggaagaggaagaagaagaagaagaagaagaagaagaagaagaagaagaagaagaagaagaagaagaagaagaagaagaagaagaagaagaagaagaagaagaaaaggaagaagaagaaattgtttttatatttttatttttaggataagtttattgtttggtattaagttttttggggtgaatttttttttaaaagagttcggggagtttaggtatggaatgggaggtagaaagtttaattaagggattgggatttcggaatgaataatgaagggagatggattgggtttatgtcgaaggtttttttttggttttttagttttcgggcgaagatttagggagatattgagatatattttgtataggagggggagggggagggggagggtaaagttttagggttttaggagtggtttttaagggtttaggtttcgaggcggtgtttggggttgggaggtttagtattgagaattttttatttttttagagttttttttttttttttaattcgtgttaggtttttttttttggatatttataacgcggttttattttttatttttattgggcgtcgcgtttttagagaagttaattagtgtcgtcgtagtttttaggttttaaagttttacgtatttcgcgggatttatattttttttagacgcggaggttggggttatggcgtttcgaagtttttttttgttgtttttaggggttttggttttgatcgatatttgggcgggtgagtgcggggtttagagagaaacggtttttgtggggaggagtgaggggttcgttcggtgggggcgtaggatttagggagtcgttttcggaggagggtttggcgggttttagttttttttcgtttttaggtttttattttttgaggtattttagtatcgttgtgtcgcggttcggtcgcggggagtttcgttatatcgtcgtggagtacgtagacgatacgtaatttttgcggttcgatagcgacgtcgcgatttcgaggatggagtcgcgggagtcgtgggtggagtaagaggggtcgtagtattgggagtggattatagggtacgttaaggttaacgtatagattgatcgagtggttttgaggaatttgtttcgtcgttataattagagcgaggttggtgagtgaattcggtcgggggcgtaggttacgattattttttattcgttacggatcgttcgggttttttagagttttcggattcgaaatttatttcgaggtagcgggattcgtttagattttttattcgggagagttttaggcgtttttatttaggtttatttttagtttaggttaaaattttcgcgggttgggcggggagggggcggggttagttgggcggggttgattgcggggatcggttagggttttatattttttagggaatgaatggttgcgatatggggttcgacggacgtttttttcgcgggtattattagtacgcgtacgacggtaaggattatatttttttgaacgaggatttgcgtttttggatcgcggcggatatcgtggtttagattatttagcgtttttatgaggtagaggaatatgtagaggagtttaggatttatttggagggcgagtgtttggagttgtttcgtagatatttggagaatgggaaggagacgttatagcgcgtaggtattaggggttatgggcgttttttttattttttgtagattttttgggatggtttcgtataaggttgggaggaaagtggatttaatgttaggatatcgttttttttttagttttgagtaggaagaatttttttggttttcgagattcggtattagagagtgattgtgagagttcgttttgttttttgggataattaagggatgaaatttttgagggaatggagggaagatagtttttggaatatcgattcgcggttttttttgagttttttaatagttttgggtttcgtgattttttttttaagttttgttttttgttttatatttaatgtgtttgaggttttgattttagtttttcggtttttatttaggttagggttagaagtttttgttttttttttagagattttaattttttaaggaataggagatttttttaggtgtttgtgtttaggttggtgtttgggttttgtgtttttttttttattttaggtgttttgtttatttttaggttggttatatgggtgttgttggggttttttatgaggagtgtaaagtgtttgaattttttgattttttttagattttttaaaggtatacgttgtttattattttatttttgattatgaggttattttgaggtgttgggttttgggtttttattttgcggagattacgttgatttggtagcgggatggggaggaatagatttaggatatagagtttgtggagattaggtttgtaggggatggaattttttagaagtgggtcgttgtggtggtgttttttggagaggaatagagatatatatgttatgtgtagtacgaggggttgttttagttttttattttgagatggggtaaggagggagatgggtaaagaggggaacgaggggttatgtttttttttagggaaagtaggagtttttttggagttttttagtagggttagggttgaggtttggagattagggttttttatttttttttttttttttagagtagtttttttagtttattatttttatcgtgggtatcgttgttggttttgttgtttttggagttgtggttattggagttgtggtcgttgttgtgatgtggaggaagaagagtttaggtaggaaggggtgaggagtggagtttgagtttttttgttttattgggggttgtaagttttaagtagaagtgtgttttgttttattattgggaagtattatttatatttatgggtttatttagtttgggttttgtgtgttagtatttatttatttgtaaagtttttgtgaaaatgaaggatagattttttatttcgatgattatggtggtgatgggatttgattttagtagttataaattataggggaaggtttttgttgatgatagattttaggagggtagttggtttaggatttatatttgttttttttatattttttgattttgttttggatttatagttatatttttttggaaatttttttgggattaaagattaggggtttgttttaggattttatggttttgttttttttttggttttttataggatattttttttttatagatagaaatagagggagttatttttaggttgtaggtaagatgaaggaggttgatttttgagattgttgggatattgtggttaggagtttatgagggagtttatttattttatagtttttttagttatatttgtgggttttgattaggttttgtttttgttttattttaattattgatagtgtttagggttttggggtgttttttatagttaataaaggtgatattttagggtaggggttttgatgtgagtggggtgttgggggggaatagaggggatttagttgtgttattgggtttttttgatttggatgttttgagtatgaaatgggttatttagagtgttattttttattgtgattgatacgaatttgtttatgaatattttttttatagtgtgagatagtttttttgtgtgggattgagaagtaagatattaatgtagtagaattgtatttgtgttttacgaatatatataaattttaaaaataaagaataaaaatatatttttttatagatataggtagatatgtttttatagtatgtacgtaaatgtgtgtgtgtgtgtgtgtgtgtgaagagaaagagtgaatagagagattaagatttttttaatggtgaaaagatatatatatatttggaattagttagtttgatttagtttaggtgattttaattttggtggtaataattaaagtatcgtagttaggagttagtcgaatatatgtttttttttttttattagattgaattagagtgttgattttggttatattaatgttataaatttttttatagtttgtttgatttggtgtttgttggttttaatatttatagtgaatataagtaggttgttgttttttattttttttatagtttatttagtggttagcggaaatttgatgataatatggtggttaagtttattttttttgggggtgtttttttaaggatatttgggttgttttcggagttatagtgttttgggtcgtcggaaggtgggtgatatgtggattttgttttttttgtggttgtggatattttttaatattgtttttttggttttgtaaagttttcgttttggtttcggttttaggaggggtaggagttttttttttcgtttttggtattattttatgaaaagggtttagattaagatttttgattgagttattttaaagtaagttgtaagatttatgatattagattattaaatattttattatatattttttaagaataagaattaatattattatattaaagaaaataaataattttataatattatttaaagtttttttatgtttaaatatttttattttttttagtatatttttgtatttattttttatagtttgtttttttaaaatgtttattcgttgtttttggttatgtttttttaattatttataatttataataattaatttatttttttttttttagaatggtattatttgttttagagatgaggttaaatatttgtggaattttttttatattgaatttattatattattttttttgatgtttttaattttttttttttaattgttatgttttttaaggatttatgtagttttgggttaaatatttggtagtaatgtttataggaggagttgtgatcgtatatttattatattaggaggtatataaagtttagggttattaggattttttttgattttatatagttaaatttattttgattttttagagatgtagaattatgggttgggtgtttagtgggtatgagtgtgatattttggtaataggaggttttgttattttttttattttttacgagttttagttttttatattttgaggttttgagttttagatttttaattattaggttaggtttttttagatttagattttttttttgttttttttagttttattttgttttgtatttattttcggattattttttttttataggtttagtttttgagtgtttttattttttaaataagtatttttatttaggagtaatttttttattagaggatattagttatgtttggaaaaatgttttgttgttatgattggagtgaggaggaggtgttattagtattttgtggggaatgattagggatgttgaatattttgtagtgtataagttagtttaattatttatataatagataattatttagttttaatattaagattgttaagggtaaggaggtttgttaggatttttttttttttgagtataagtttttttgaattgagggatattttgaaggaaaagtgtggttttattttagttattttttttttttttggagttttatttgtatgtttgtagtgtttaggtttgtaatttggggtttaggaatttatttttttatgagattgtatgtagaagtgatgatatgtgtatata

SEQ ID NO: 114 - DNA, 6944 bp, Artificial Sequence
  chemically treated genomic DNA (Homo sapiens)
tgtgtgtatatattattatttttgtatgtagttttatgggaaggtgggtttttggattttaggttataggtttaagtattataggtatatagatggagttttagggaagggagagatgattggggtgggattatattttttttttagggtgttttttagtttaaggaagtttgtatttaagggagagaaagttttggtaggtttttttatttttggtaattttggtattggggttggataattatttgttatgtgggtgattgggttgatttgtgtattgtaggatgtttagtatttttggttattttttataagatgttggtagtattttttttttattttagttatggtaataaaatatttttttagatatagttaatgttttttggtgggaaaattgtttttggatgagaatatttgtttgagaggtagagatatttaggagttgggtttgtagagggaaagtgattcggaagtagatataaagtagagtggggttggagaagataggaagggagtttaggtttggaggggtttggtttgatggttgaaggtttggagtttagaattttagggtatggggaattaaagttcgtgaggaatggggagagtggtagaattttttattgttagaatattatatttatatttattaaatatttagtttatggttttgtatttttgggaagttaggataaatttggttgtatggggttagaaagagttttggtaattttaggttttgtgtgttttttgatgtgatgaatgtgcggttatagttttttttgtaaatattgttgttaaatgtttaatttagagttatataggtttttaggaggtatagtagttagaggaaaaaagttaaaggtattaggggaaataatatgataaatttagtgtggagaagattttataggtatttggttttatttttgaaataggtaatgttattttaaaagaaaaaagatgggttgattgttatagattgtaggtaattaaagaaatataattaaaggtaacgagtggatattttaagaaaataagttataaaaaataggtataaaaatgtattgaaagaagtggagatatttgaatataaaaggattttaaataatattatggaattatttattttttttggtgtgataatgttggtttttatttttaggaggtgtgtgatgaagtatttagtggtttagtattatgggttttgtaatttattttagaatgatttagttaaaaattttaatttggattttttttataagatggtgttaagaacgaagaaggaagtttttgttttttttaaagtcgaagttaaagcgaaggttttgtaaggttaagaaggtagtgttgaaagatgtttatagttataaaaaaaataagatttatatgttatttatttttcggcggtttaagatattgtgatttcggaggtagtttaaatatttttggaagagtatttttaggagaaataagtttgattattatgttattattaagttttcgttgattattgagtaggttgtgaagaagatagaaaataatagtttatttgtgtttattgtggatgttaaagttaataagtattagattaaataggttgtgaagaagtttgtgatattgatgtggttaaagttaatattttgatttagtttgatggagagaggaaggtatatgttcgattggtttttgattacgatgttttggttgttgttattaaaattgggattatttaaattgagttaagttggttagttttaaatatatgtatatttttttattattaaaagaattttaatttttttatttattttttttttttatatatatatatatatatatatatttacgtgtatgttataaaaatatatttatttgtatttataaaaagatatatttttattttttatttttaaaatttatgtatgttcgtgaggtataagtgtaattttgttatattgatattttgttttttagttttatataaggaagttgttttatattatagagaaaatatttatgaataaattcgtattagttatagtgagaggtaatattttaaatagtttattttatgtttaagatatttaagttaaagaaatttaatagtatagttgagttttttttgtttttttttaatattttatttatattagggtttttgttttggagtgttatttttattagttgtgagagatattttagagttttgggtattgttagtgattggggtagaataaaaataggatttggttagagtttatagatgtggttagaggaattgtggggtgggtgagtttttttataggtttttgattataatattttaataattttagggattagttttttttattttatttgtagtttgagagtagttttttttgtttttatttatgggaagaaaatgttttgtgagaggttagaaaggaggtagggttataaggttttagagtaaatttttagtttttgattttagagaagtttttagaaaagtgtaattgtagatttagggtaggattaagaaatatgaagaaagtagatgtgggttttggattaattgtttttttgaggtttgttattagtagggatttttttttgtgatttgtgattgttgggattaggttttattattattataattatcgaagtgaagaatttgttttttatttttataggagttttataaatgagtaggtgttggtatatagggtttaggttgggtagatttatgagtgtggatggtgttttttagtaatgaggtagggtatatttttatttggggtttgtaatttttagtgggataagaaaatttagattttattttttatttttttttatttgagtttttttttttttatattatagtagcgattatagttttagtgattatagttttaaggataataaggttagtaacgatgtttacgatggggatggtgggttggggagattgttttgggaaaggaagggaaggtgaggggttttgatttttaggttttagttttgattttgttgaagagttttagaagggtttttgttttttttgagaaaagatatgatttttcgtttttttttttatttatttttttttttattttattttaggatgaggggttggggtagtttttcgtgttgtatatggtatgtgtatttttgtttttttttaggaggtattattatagcggtttatttttggaaggttttattttttgtaggtttggtttttataagttttgtgttttgggtttgtttttttttatttcgttgttaggttagcgtgattttcgtagggtagaagtttagggtttagtattttagggtggttttatggttagagatggggtggtgggtaacgtgtgtttttggaggatttgagaagagttagaaaatttaggtattttgtattttttatgggaaattttagtagtatttatgtgattaatttgagaatggataggatatttggggtggggaagggagtatagaatttagatattagtttggatatagatatttgggaaaattttttattttttggaaagttagagtttttgaggggggagtagggatttttggttttgatttaagtggaggtcgagggattggaattagagttttaaatatattgagtgtgaggtagagaataaaatttgagagaaaagttacggggtttaaggttgttggagggtttaaaggggatcgcggatcggtattttagggattgttttttttttatttttttagaaattttattttttaattgttttagagagtagggcggatttttatagttattttttggtatcggatttcgaaagttaggaagattttttttatttaggattagagggagggcgatattttagtattgggtttattttttttttaattttgtgcgaggttattttaagagatttataggagatagggaaggcgtttatggtttttggtatttgcgcgttgtagcgttttttttttattttttaagtatttgcggagtaattttaggtattcgttttttaggtaggttttgaatttttttgtatatttttttgttttatagaagcgttgggtgatttgagttacggtgttcgtcgcggtttaggagcgtaggttttcgtttagggagatgtaatttttgtcgtcgtacgcgtgttggtgatattcgcggaggaggcgttcgtcgggttttatgtcgtagttatttattttttggagggtgtgagattttagtcggttttcgtagttagtttcgtttagttagtttcgtttttttttcgtttaattcgcggggattttggtttaaattgaaaatgaatttgggtaaaggcgtttgggattttttcgggtggagggtttgggcgggtttcgttgtttcggggtagatttcggattcggagattttgagggattcgggcggttcgtggcggatggggggtggtcgtgatttgcgttttcggtcgggtttatttattagtttcgttttggttgtagcggcggagtaggttttttagggttattcggttagtttgtgcgttggttttggcgtattttgtggtttatttttaatattgcggttttttttgttttatttacggttttcgcggttttattttcggaatcgcggcgtcgttgtcgaatcgtaggaattgcgtgtcgtttacgtattttacggcgatgtagcggggtttttcgcggtcgggtcgcgatatagcggtgttgaaatattttaaggagtgggagtttgggggcgaggaggggttgagattcgttagattttttttcggaggcggttttttgagttttgcgtttttatcgggcgggttttttatttttttttatagaggtcgtttttttttggatttcgtatttattcgtttaagtatcggttagggttagggtttttgagagtagtaggaggaggtttcggggcgttatgattttaattttcgcgtttgggaaaaatatgagtttcgcggggtgcgtgggattttagaatttgggaattgcggcgatattgattggtttttttagaaacgcgacgtttaatgggagtgagaaatggggtcgcgttatgagtatttaggaagaaggatttgatacgggttgggagagaaagagaaattttggggagatggggaatttttaatattgagttttttaattttagatatcgtttcggggtttgagtttttgagagttatttttggggttttgggattttgtttttttttttttttttttttttttgtgtagggtgtgttttaatgtttttttgagttttcgttcgggggttgagaaattagggagaaattttcggtatggatttagtttatttttttttattatttatttcgaaattttagttttttgattgaattttttgttttttattttatatttggatttttcggatttttttggaagaaaatttattttaaggagtttggtgttagataatgaatttgttttgagaatgaaggtgtagagatagtttttttttttttttttttttttttttttttttttttttttttttttttttttttttttttttttttttttttttttttttttttttttttttttttttttttttttttttttttttttttttttttttttttttttttttttttttttttttttttttttttttttttttttttttttttttttttgttttttttcgttttttttttttttttttttggaaaagttgtatttgagtatatgaaataggatagagattagttttttttttttttttttttttttattagttgtagtgagtagtagaattttggtaatttttgaattattaggaattttttttttttttttttttttttttttttttttttttttttttttgagacggagtttttttttgtcgtttaggttggagtgtagtggcgcgatttcggtttattgtaagttttgcgtttcgggtttacgttatttttttgttttagtttttcgagtagttgagattatagatgttcgttattacgttcggttaatttttttgtagagacgggttttatcgtgttagttaggatggtttcgattttttgatttcgtgattttttcgtttcggttttttaaagtgttgcgattataggtatgagttatcgcgttcgattaattaggaattttatgtgtaaaaattgttattttggttttttgatatataaatgtgtttaaatgtattatagttgtataatttttagagtttttaagttttgtttttttagattatgtatttgtgatttttgttgtattttaaaattatttttattttatagttttgagtttttgtgggagtttaggatattttttgataatataaagtagtataacgtgtgattgtatattgtaattaggagttaatatatttatttattttaaagttgtaagtgtttaacgtagttataatgttttttattagtgtttatgtattttttgtttttaggaagtattcgtatttaagtggtgtgtatgttttattggaatatttagtatttttttaaatttgaaaaaaagtagaaaaagtaattaatttttaggtagttttatataaggtgttaaaggttaaatgtaaggaatattttgttaggttttgtagatggatgtattaaaaatttataaaataatgtgtttaaagttaagaattttgttgtttttaaattttgtttttttgttttttttttttattttttgtttttttagttttttttttcgttttttttattttttaggtttttttttttttttagtttttattattttgttatttttgaatagtggttttagtattgttttattatttgttatttgagtgttttttttatagtggttttgttattgtgagttaaagtgtgtcgtttttttatttaaaatattttagtggttttatttcggttttgtgaagtttt

SEQ ID NO: 115 - DNA, 3001 bp, Artificial Sequence
  chemically treated genomic DNA (Homo sapiens)
ttattttattagataaggttgttaaattaaggttttgaggtttttttatagataatgtgaagttatttatggtttttgagaaatagagggagtagaattttgtgtttttaatggattatttgaataggagtgaagaagtttgtttaaaaaaaaagattgagaaatttgttgagagattattataatggtttatatgaatgttaataaagttttgttcgggggaatgtatagtgaagaataaataggaaaaattattttaaaagaagaaataataagatttggtaaaggtttgattatgtaaatagtggggaagttagagttttgagtttaaatatgtggtagaattggtgtagttaattttatttggaagattaagaatagaaagatgatagttttaatattgagtatttgaagttttttagtataatattggatagaattggaaaaaataaatttggggattattagtttttaagcggtattaaaagttatgggaaaggaagataatttatggtaaattgtatagaaaagatagaaggtttatattaaggtttgggaaagtttatttttcgaagttatattgtgaggtgatatgtttttaggtatgggttagaaaaatttttttattcgtttatatttattttatatttttttagagtgtagagtttgtgaaaggttaggttatgtttatatatagttttttattttttttttgagtttgttgaattttttttgtagagttttttttttttcgtttagttcggggggtattattaatatggtggtttttagtttaggggtagggtttaagatatttttttttattgttattattcggggtttatacgtcgtttatattgtatttaattttatttttttaggtttgtttatttttgtttttggttttttttattttttgtttaaattaggttgttgtttaagttttcgttggtcgggattatttagtatttttttttgtttttagggattatagatattagtatttttaggtattatgtggtttaaggagggataaatatttatttcgtcggaaagacgatggtattcgatttttttattttcgttagggtaaggataatcgcggggtttgaacggtagagaaggcggtggagttagcgtagcgttcgtagagtaacgtaaagaggaagaatagagaaacggttatgagaaaaagggtcgaagagtgagaagtagagggttttattcgagggggcggtaatcgggggttttacggttttcggtcgcgttcgcgttggtcgttgatagcgggtttataacgatgacgtagcgaggagcggaaaacgcggtaattaaggcggttttaggcgcgtattttcgttcggttttttatcggtttaggtttgttttttcgtagcgatagtttacgttttcggcggggttgtatcggaagttgtttttattttcgttcgtttcggggcggggtttatttcgtagcgattatttgtcgtattttcgggttgttaggtagttgttgtggttttaggatgatggagatagagcgatttggtgagggggaggggagggaaatggaacggagtagtcgatatggaatgaattttgatttttgatttttgattttttttcgtagtgttattttttttagattttttggatttattttttcgggtcgtggagttcggatgtacggggtattgggagttgttgaatttgtttggagttttagagagtagcgtgagtgatttttgattttaatttttgattcgtattgagtttaaattttttttattttttttatagtaggatttagtttaattttgtttatttgtgtttgtatttttgtttattttagtttgaaggggtgttggatagattatagtttagtgtatttgtagtacgtgtgaggatagagtagaaagggttggggatatttttgttttgagagttgtttttttaaatgtggtattttttcgtggagtttttttttgtatttaagtattagggtatttggtgattgagatgataggttttgagtttttaattttttatttttaggtttgggatttttttttttaaaattagtgagtttttaattttagtgtgttttatgattagttagggagttttttaaaaatgtatatttttaggtttagtttttatgtttttgaaatttaaaatttgttttaggtaatttagtagtaggtagtttttggttaagtttgattgttttagtttgtttgatatatttgttatttttgatttgaatataagttttattattttttttgtttgtattttattttttttttttatttaatgttttttattttgtttttgttttagtttttttatggtttttttttttgtgttttagatttgtagtaagaagtagaatagttgtttttgttatttttagtttggttgtttttgtatggtgtggagtatttagttcggtgaggagtttggaggggtttagattagggtgatgggtttttgaaggaagttgggatagaggaagaaagaagatttaaaagttattatttttttttttagaaaatggtagaggaagacggatttttggttttttttggttgttttgggagttttagttttattcgatttataggtttaaagatatttaattataggttagatattgggttataaagaggtaggaggttaggggttatgagaaatagttggggagaaggggaggtggttagagataagtttagttttattggggttttgattttttgttttaggttttgttggagaatataaatttttcggttataatttttttgttttttcgtcggtttttagggttagttttttagtttttatggggaaatttaattcggtattttttttggttaggtgatttttgtggagatgggatggtagaagagggtgtttttaatttttagggaagggttttttatttatttcgtattatttttattttatgaatttttgtttgttttgtttttttttaggg

SEQ ID NO: 116 - DNA, 3001 bp, Artificial Sequence
  chemically treated genomic DNA (Homo sapiens)
ttttgggaagagataggatagatagggatttatgggatgagggtaatacgagataggtggggaatttttttttggagattaaagatatttttttttattattttatttttataagagttatttggttagaagggatatcgagttggatttttttataaggattgggaggttggttttggaggtcggcgaagagataaggaggttgtagtcgagagatttgtgttttttagtaagatttaaggtaagagattagagttttaatgaggttgagtttgtttttgattatttttttttttttttaattgttttttatgatttttgattttttatttttttgtaatttagtatttggtttgtggttgggtgtttttgggtttgtaggtcggatgggattggggtttttaggatagttaaaagagattagggattcgtttttttttgttattttttggagagaaaaatagtaatttttgggttttttttttttttttgttttagttttttttaggaatttattattttagtttaagtttttttagattttttatcgggttgagtgttttatattatgtagaggtagttaggttggggatgatagaaataattgttttgttttttgttgtagatttggggtataaggagggaggttatggggaagttgaaataagggtaagatgagaggtattaggtaaggaaagaggataaaatgtagataaaagagatgatgggatttgtgtttagattagaaatggtagatgtgttaaatagattaggataattaggtttggttaaaaattatttgttattgaattatttggggtagattttggattttagaaatatggaggttggatttaggaatgtgtatttttaaaaagttttttggttaattatgaagtatattgaaattggagatttattgattttagaaaaaggggttttagatttaaggatgaaaggttggaggtttaaagtttattattttagttattaagtgttttggtgtttggatatagaagggagttttacggagaaatgttatatttgaaagagtagtttttaaagtaaaaatatttttagttttttttgttttgtttttatacgtattgtaggtatattgggttgtaatttgtttagtatttttttaggttgggatggataggagtataggtatagatgaataaggttaagttagattttattgtgaggagggtgaaggaggtttggatttaatgcgggttaaaggttagggttaaaagttatttacgttattttttggagttttaggtaagtttagtagtttttagtgtttcgtgtattcgagttttacggttcgaaggggtaggtttaggggatttggagggggtagtattacggggaaaggttaaaagttaggggttaaagtttattttatatcggttatttcgttttatttttttttttttttttttattaagtcgttttgtttttattattttggagttatagtagttgtttggtagttcggaagtgcggtaagtagtcgttgcgaagtaagtttcgtttcggaacgggcggaagtagaggtaattttcggtatagtttcgtcgagagcgtgaattatcgttgcggaggggtagatttggatcggtggaaggtcgggcggaagtgcgcgtttggggtcgttttggttatcgcgtttttcgtttttcgttacgttatcgttgtgagttcgttattagcggttagcgcgggcgcggtcggagatcgtggggttttcggttgtcgttttttcgggtaaggttttttgttttttatttttcggtttttttttttatagtcgtttttttgttttttttttttgcgttgttttgcgggcgttacgttggttttatcgttttttttgtcgtttaaatttcgcggttgtttttattttagcgagggtaggggggtcgggtgttatcgttttttcgacggagtggatatttgtttttttttgaattatatggtatttaaaggtgttggtgtttgtgatttttggagataggagggaatgttggatgatttcgattagcgggagtttggatagtagtttggtttaagtaaggggtagggaaagttaaagataagagtaggtagatttgaaggggtggggttgggtatagtgtggacggcgtgtgaatttcgggtggtaatagtggagaaagatgttttgggttttgtttttgaattaggagttattatgttggtgatatttttcggattgagcgaggaagaggaggttttgtagaagaaatttaataagtttaagaaaaaggtgagggattgtgtgtggatatggtttaattttttatagattttgtattttgagaagatatggggtgagtgtgagcgaatggggaagtttttttggtttatatttagagatatattattttatagtgtagtttcgagaggtgggtttttttaagttttggtgtggattttttgttttttttatgtaatttgttatggattgttttttttttttatggtttttagtatcgtttaagagttgatgatttttaagtttgttttttttagttttatttagtgttatattgaaaaattttagatatttagtgttgaagttattatttttttatttttgattttttaaataagattgattatattaattttgttatatgtttggatttaaaattttgatttttttattatttgtatagttaaatttttgttaagttttattgtttttttttttgaagtaattttttttgtttattttttattgtgtattttttcgagtagggttttattgatatttatgtgggttattgtaatggttttttaataaattttttagtttttttttttgaatagatttttttatttttgtttaaatgatttattgaaaatataaaattttgttttttttgttttttaaaaattataaatggttttatattgtttataaaaaagttttaaaattttagtttggtagttttgtttagtaaagtag

SEQ ID NO: 117 - DNA, 8056 bp, Artificial Sequence
  chemically treated genomic DNA (Homo sapiens)
agtttgtttggtcgttttagggtttgttggaatttttttttcgtttatgtatttgtgaattattttacgtttgttattatcggttttttatagggtgatgtttattagtagtggtgataggttaatttttattattttttatgcggttgaatagttatttttgaattatttttttttttagtaattttttttttttcggattttttgtagttaatttgaaagaataataaggaggtggttggaaatttgttttaaggaatcgtttgtttttttttcgttggaaattttgtatttcggacgtttttgtttttgtttttatttgattttcgttttcgttgatatttaggcgcgatgatttttgttgttagtagagggtatatttattttattttcgtaaatttgaacgcgggtgttgtttagagagggggcggagggaaagacgttttgtagtaaaatttagtatagcgattggttgtttttcgcgtttgcggtaaaggtttggaggtaggagtaatttgtaatttttaaagttgaattgtgtagtgtatcggatttggaagttattatatttatttaatatttgaacgttgagttgtaaatttaacgggtaataatttattttgaatagcgtatatgttatatacgtatttttttttttcgaattgtttttttttttggaggtggtggagggagagaaaagtttatttaaaatgtttttgggtgagggattaaggatgagaagaatgttttttgttttttatgtcgtggaataatataaaataaaaaatttcgagggaatatatattatatattaaatatagattattttagggagtaaataaattatgtgtggggttgggtaattagttaagtcgaagcgtaaataaaatgtgaatatacgtttgcgggttatatatagtgtatttttattagtatttagaaaaaattgtgagttagtgaattaggaaattaatgtttggaaggtagttaaattttaattaatttaagatttttttttttttaaaaaaaggtacggaagtaatatttttttttttttttttgattagaatcgatgtattttttgtgtatgatcgtatttttaataataaaaggggaaagaggatttggaaaggaattaaacgttcggtttgttcggggaggaaagagttaacggttttttttataagggtttttgttgattttttcggttcggtttataagttttttatttgttttttttaggaagttcggtttcgcggttcgggtattttttgttttttttatattttttcgtttagtatttttgattttttttaaattcggtagttcgagattgttgtaaatcggcgttatagggcgtaaaggggatttgttttttttgaaatttggttgagaaattgggaatttcgtgtgggaggcgtgggggtgggacggtggggtatagattggtagagagtaggtaatttttttttcgttttagtttagttttggaataggtagatatattttagggttaaatagacgtttttcgtacggggttttacggaagtttgagtaggcggggtaggaggggcggtatttgttgttttggtagtaaattgggggatttagtttgggtggaaggtatttaatttagatagttgtgtatatataatgtataatatatgattttttttaataaatgtaatgggagtttatttataacgcgttttttaagtatacgtggtaatgcgttgttgggttattttaattattttaggtatcgtttttttttttatgtttttattatttttttttatttatattaatattttacgttttgaacgcgcgtttattaatattttttttttttttattttttttgggatttttgattaaagcgcggttttttttttagttttagcgaggcgttttgtagtttggtacgcgcgtggcgtggcggtgggcgcgtagtgcgttttcggtgtggagggtagttgtttcgtttgcgatgatttatatttataggataaggatgcggtttgttaaataatattgttacggaggagtagtagagaaagggagagggtttgagagggagtaaaagaaaatggtaggcgcgcgtagttaatttatgcggtttttttattttgtttatattttagagttagagtgttcggttgttcggttgagttttttttttattttttttattttttttattttttttataagcgtttttttcgggtttttaaagtagagggcgtgggggaaaagaaaaaagattttttttcgttaattttcgtttatcggttttttataatgcgagggtttggacggttgaggattttcgagttgtgttgttcgcggtcgttatcgtcgggtttcggtcgtttttggttttttttttgtttcgagaagggtagggttttttagaggtttggcgggaaaaagaacggagggagggatcgcgttgagtataaaagtcggttttcggggttttatttaattcgttgtagtaattttagtgagaggtagagggagcgagcgggcggtcggttagggtggaagagtcgggcgagtagagttgcgttgcgggcgttttgggaagggagattcggagcgaatagggggtttcgtttttggtttagatttttcgttgattttttaggtagcggttcgtaatttttgtcgtatttacgaaattttgtttatagtagcgggcggatattttgtattggaattgataatattcgattaaggacgcgattttttcgacgcggggaggttattttgtttatttggggatattttttcgtcgttgttaggattcgtttttttgaaaggttttttttgtagttgtttagatattgaatttttttcgggaagtggaaaattaggtaagtatcgaagtttatttgttttttaatttatttttttattagtttaattttgagatgagtcgaatgtttaaatagggtgtttttttttttaattttgcgttattgatatttttttcggggtgggggttattttagaattggatcggggtatagtgatttgttaagatgggggaggagaagatagagggaaaacgggaatggtttttacgattattttttcgagatttttgttttatgaatatatttacgtcgattttcggtcggtcggatatttttattttattgtgttaattgttttttgggttttggggggcggggggttgttttgcggtgggtagaaagttttttgtattttgagttttttggagaagggatcgtatatcgtttgtgtgagttagatcgtttcgtaggcgttgatttgttttcgttttcgggagggtagttaaatttcgatttatcgtatttttgatagtcggagacggatattgcggcgcgtttcgttcgtttgttttcgcggcgattttaattcgttttgatttttttaagaagttgatatttggttttttaaaaagtaataaaataatttaaaatttgggtttttagaagtgttaggacgtggtgttgggtaggcgtaggtaggggaaaagggaggcgaggatgtgttcgatttttttgtaatcgttgatttggaaaaattagggcgaattttcgtatttagttttgatttttttgtcgcggtcgttttcgggtgttttcgcgttcgagatgcggaggaattgcgaggagcggggttttgggcggttttaaaatagttgttatttttggtggggtggtttcgggggaggtatcgtagcggggtttttggcgtagttgtattttcgtattgagtgcgaagggaggtgtttttattattatttgatattttttttgtatttatggaggggtgttaaagttcgcggttgagttcgttattttagtcggcgagagaaagaagaaaagttggtaaaaggagtgttggacgggggtagtattgggggtggggacgggggcggtggagagggaaggttgggaggggttgcggtgtcggcgggggtaggagagcgtttagggcgcgagtgggaatagtcgtagcggaggggtttcggcgcggagcggggtttacgtagtcgttttcgtttaggcgtttttcgtttttttttttaggtggcgtaaaattttgtgttttggattttggtaaattgtattttttatcgttatttttcgcggttttttaagggcgttagggtcgatttcgatttttttgtcgttgcggggtcgattttcgggttttgcgtttcgggttttcgggggagcgggggttcggcgggtattaagacgttggtttattaagtgcgttttcgagatagtaggggattgtttaaagggggtgaaagggtgttttttttatttttttattaagattatttagtcgttttaggggatagttttgtaaggggagaggttcgggattgtggcgcgtattgcgcgttgcgttaggttttcgtattaagatttttttaatttaagattgtttttcgttttgtgtgtttcgttttagtagtttttcgcgacgatgttttttaacgttagttttattaataggaattatgatttcgattacgattcggtgtagtcgtatttttattgcgacgaggaggagaatttttattagtagtagtagtagagcgaattgtagttttcggcgtttagcgaggatatttggaagaaattcgagttgttgtttatttcgtttttgttttttagtcgtcgtttcgggttttgttcgtttttttacgttgcggttatattttttttttttcggggagataacgacggcggtggcgggagtttttttacggtcgattagttggagatggtgatcgagttgttgggaggagatatggtgaattagagttttatttgcgattcggacgacgagatttttattaaaaatattattatttaggattgtatgtggagcggtttttcggtcgtcgttaagttcgttttagagaagttggttttttattaggttgcgcgtaaagatagcggtagttcgaatttcgttcgcggttatagcgtttgttttatttttagtttgtatttgtaggatttgagcgtcgtcgttttagagtgtatcgatttttcggtggtttttttttatttttttaacgatagtagttcgtttaagttttgcgtttcgtaagattttagcgtttttttttcgttttcggattttttgtttttttcgacggagtttttttcgtagggtagtttcgagtttttggtgttttatgaggagatatcgtttattattagtagcgattttggtaagcgaagttcgtttaggtttgttaaaagtgggcggttggatattttttttatttttattggtagtttatttaacgggttatttttattaggaaggagagatagtagatttggagagatttgggagtttattatttttgaaattttgggttttagcgtttttttttattttttttttttagattgtttatgtttgtagttttttttttcgtttgttttttattttttaggaattttatttaggtttttaaattttttggtttattttataatttaatttatttttttttatttttcgttaatattttaattgttttggggcggggtggtagggagtgtatgaatgaggataagagaggattgatttttgagagtgaatgaattgttttttttttaattttcgagaagtggtgggatttaatgaattatttataaaaatgaggggttgtgtttagaggttaggtagggtttgtttgagtgcgggagttagtgaattgttttaagagtgggtgggttgaggagttgggatttttttagtttattttgaatattgaaaagtaaatttttgttaaagttggatttttttttttttttattttttttttcgtttttttggatttttggtaaaattgtaattttttttttttttattttttatttttagtaaaatagggagttgttaaagttatattaagtaatttgtagttattatttgtaatatttgaagtgtttttggtaaagttttttaaaaataggaggtgtttgggaatgtgttttgttttgggtgtgtttaaagttttattaagttttaggtaagaattggtattaatgttttattttgggaagttgtattttttttgtttatgttataatttagttgtttttttttttatgagatttttatttttatggtgagaggagtaagggtggttggttagattggttttttttttttttttttttttttttaagacggagttttattttgttattaggttggagtgtagtggcgtaattaatttttaattttttggtttaagagatttttttgttttagttttttaagtagttgggattataggtgtatattattatgttaggttaatttttgtaattttagtagagatggggttttatcgtgttggttaggatggttttttttgattttacgattcgtttatttcggttttttaaagtgttgggattataggtgtgagttagggtattaggtttagatgtggttttttggggagataattttgtttagagatttttttaacgtatttatgttttgtatttgtatagtattaatttggtaattgattattttaatgtaattttgttaaaggagtgatttttatttttttttttaaagaggaggaataagaagatgaggaagaaatcgatgttgtttttgtggaaaagaggtaggtttttggtaaaaggttagagtttggattattttttgttggaggttatagtaaatttttttatagtttattggtttttaagaggtgttacgtttttatatattagtataattacgtagcgtttttttttattcggaaggattattttgttgttaagagggttaagttggatagtgttagagttttgagatagattagtaataatcgaaaatgtattagttttaggttttcggatatcgaggagaatgttaagaggcgaatatataacgttttggagcgttagaggaggaacgagttaaaacggagtttttttgttttgcgtgattagatttcggagttggaaaataatgaaaaggtttttaaggtagttatttttaaaaaagttatagtatatattttgttcgtttaagtagaggagtaaaagtttatttttgaagaggatttgttgcggaaacgacgagaatagttgaaatataaatttgaatagttacggaatttttgtgcgtaaggaaaagtaaggaaaacgattttttttaatagaaatgttttgagtaatcgtttatgaatttgttttaaatgtatgattaaatgtaattttataattttggttgagttttgagattgaaagatttagttataatgtaaattgttttaaattggattttgggtataaaagaatttttttatgtttattattttttttttttttttaatagatttgtatttaagaattgtttttaaaaaattttaagatttatataatgtttttttgtaaatattgttattaaatgtaaataattttaataaaacgtttatagtagttatatagaattttaattttagtatatagtatttagtattataggtattataaattttaattttttttatttaagtatattttgttttttaaagttgatttttttttattgtttttagaaaaaataaaataattggtaaatatattattgagttaaattttaagttgtgaatgttttgtttcgtttttttttttttttaattattattatttttgtttgtttttattaattgtttttttagagggtggttttaagaaaggtaagagtttttttttgttgaaatgggtttgggggttttaaggtttttaagtttttggaggttttaagatgttttttggagattatgataatagttagagttgatagttagaaggaatggtagaaggtaggtgagaaggtgagaggtaggtaaaggagatataagaggttaaaggtagtagttaagtatataaagaggtataaggattggggagttgggaggaaggtgaggaagaaatttttgttattttagttaattagtgttagttttttgtttattttaaatttaggaatt

SEQ ID NO: 118 - DNA, 8056 bp, Artificial Sequence
  chemically treated genomic DNA (Homo sapiens)
aatttttgggtttggagtgagtaggggattggtattggttaattaaagtaataggagttttttttttattttttttttaattttttagtttttatgtttttttgtgtatttaattgttatttttgattttttgtattttttttgtttattttttatttttttatttgttttttgttattttttttaattgttaattttggttgttattatagtttttaggaagtattttagaatttttaagaatttaaagattttaaggtttttagatttattttaatagaggaaaatttttgttttttttaagattattttttgaaggggtaattgatgaaaataaatagggatggtggtggttgggagggggaagaaacgaaataaaatatttataatttaagatttggtttaatgatatatttgttagttattttattttttttaaaaataatagaaaaaaattaattttaaaaagtaaaatgtatttaaataaaaaaaattagggtttatagtatttataatattaggtattatatattaggattgaaattttgtgtaattgttataaacgttttattaaagttatttatatttaatggtaatatttatagagaaatattgtgtaaattttaaaattttttaaaaataatttttaaatataaatttgttaaagaaaaaaaaaagatggtaagtataaaaaagtttttttatgtttaaagtttaatttgaggtagtttatattatggttaaattttttagttttaagatttagttaaggttgtgaggttgtatttgattatgtatttgaaataagtttataggcgattgtttaggatatttttgttagaaggaatcgttttttttatttttttttacgtataagagtttcgtagttgtttaagtttgtgttttaattgttttcgtcgttttcgtaataagttttttttagaaatgagtttttgtttttttgtttggacggataggatgtatgttgtggtttttttaaggataattattttgggggtttttttattgttttttaatttcgggatttggttacgtagggtaaaaaagtttcgttttagttcgttttttttttggcgttttaagacgttgtgtgttcgttttttgatatttttttcggtgttcgaggatttggggttggtgtattttcggttgttgttgatttgttttaggattttgatattgtttaatttgatttttttggtagtaggatagttttttcgagtggagggaggcgttgcgtagttgtgttgatgtgtggagacgtggtattttttgaggattagtgggttgtgaggaggtttgttgtggtttttagtagaaggtgatttagattttgattttttgttaggagtttgttttttttttatagaaataatatcgattttttttttatttttttgttttttttttttaagaaaggaaatagaaattatttttttagtaaggttatattaaaataattaattattagattaatgttgtataaatataaggtatgaatacgttagaaaggtttttggataaaattatttttttaaagagttatatttaagtttggtgttttggtttatatttgtaattttagtattttgggaggtcgaggtgggcggatcgtgaggttaggagagattattttggttaatacgatgaaattttatttttattaaaattataaaaattagtttggtatggtggtgtgtatttgtagttttagttatttgggaggttgaggtaggagaattttttgaattagggggttggaggttgattgcgttattgtattttagtttagtgatagagtgagatttcgttttaaaaaaggaaaaaaaaaaaaaaagaattaatttagttagttatttttattttttttattatgaaggtaagagttttataaagggaaagatagttgggttatggtatggataagaaaagtgtaattttttaggataggatattgatgttaatttttatttaagatttaatgaggttttggatatatttaaagtaaagtatatttttaagtattttttatttttgagggattttattaagaatattttaggtgttgtaaatgatagttgtaaattgtttggtatgattttagtaattttttattttattggaaatgaaaaataaaaaaaaaaaaaattgtagttttgttaaaagtttaagagggcgggggaaggaataaaagaaaaaaaaagtttaattttggtaaggatttgttttttagtgtttaaaataggttgagaagattttagttttttagtttatttatttttgaggtagtttattggttttcgtatttaggtaggttttgtttagtttttaaatatagttttttatttttgtagatagtttattaaattttattatttttcggaagttaagagggaagtaatttatttatttttagagattaatttttttttatttttatttatatattttttgttatttcgttttagggtaattaaaatgttaacgggaggtaagaagaagtggattgagttgtaagataagttagaaggtttaaaaatttaaatgaaatttttgaggggtgggagataaacggggaggggggttgtaaatatgggtagtttaaggggaagggatgggaggaaacgttaaagtttaaggttttagaggtgatgagtttttaaatttttttagatttgttattttttttttttaataagagtggttcgttaaataagttgttaatgaaaatgggaaaggtatttagtcgtttatttttgataggtttgggcgggtttcgtttattagagtcgttgttggtggtgggcggtgtttttttatggagtattaggggttcggggttgttttgcggggaggatttcgtcgaggagagtagagaattcgaggacggagagaaggcgttggagttttgcgaggcgtaggatttgggcgagttgttgtcgttgagagggtaggggaagattatcgaggggtcgatgtattttgaggcggcggcgtttagattttgtaggtataagttggaggtggagtagacgttgtggtcgcgggcggggttcgggttgtcgttgtttttgcgcgtagtttggtaggaggttagtttttttgagacgagtttggcggcggtcgagaagtcgttttatatatagttttggatgatgatgtttttgatgaaggtttcgtcgttcgggtcgtagatgaaattttggtttattatgtttttttttagtagttcggttattatttttagttggtcggtcgtggagaagttttcgttatcgtcgtcgttgttttttcgaagggagaagggtgtgatcgtaacgtaggagggcgagtagagttcggagcggcggttaggggataggggcggggtgggtagtagttcgaattttttttagatattttcgttgggcgtcgggggttgtagttcgttttgttgttgttgttggtagaagttttttttttcgtcgtagtagaaatacggttgtatcgagtcgtagtcgaggttatagtttttgttggtgaagttaacgttgaggggtatcgtcgcgggaggttgttggagcggggtatataaagcgggaggtagttttgagttaaaggggttttggtgcggaaatttggcgtagcgcgtagtgcgcgttatagtttcgaatttttttttttgtagagttattttttaaagcggttgggtggttttggtgggggaataaagggagtatttttttattttttttggatagttttttgttatttcggagacgtatttagtgaattagcgttttggtattcgtcgagttttcgttttttcgggagttcggagcgtaaagttcgggagtcggtttcgtagcggtagaggaatcgaaatcggttttggcgtttttaagaagtcgcgggaggtggcggtgaggaatataatttgttaaaatttaaggtataaagttttgcgttatttgaaggagaaggcgaaaggcgtttgggcgaaagcggttgcgtgaatttcgtttcgcgtcggggttttttcgttgcggttgtttttattcgcgttttaggcgtttttttattttcgtcggtatcgtagttttttttaattttttttttttatcgttttcgtttttatttttagtattgttttcgtttaatattttttttgttagttttttttttttttttcgtcggttggagtggcgagtttagtcgcggattttaatatttttttataaatataaggggggtgttaaataataataggggtattttttttcgtatttaatacggagatgtaattgcgttagagatttcgttgcgatatttttttcggagttattttattaagggtagtagttgttttggaatcgtttagagtttcgtttttcgtagttttttcgtatttcgggcgcgaggatattcgagggcggtcgcggtaggggagttaggattgggtgcggagattcgttttggtttttttaagttaacgattgtaggagaatcggatatattttcgtttttttttttttttgtttgcgtttatttaatattacgttttaatatttttagagatttaggttttaaattgttttattgttttttaaaaagttaaatgttaattttttaaaagaattagggcgggttggaatcgtcgcggggataggcgggcgggacgcgtcgtagtgttcgttttcggttgttagaaatgcggtgagtcgagatttaattgttttttcggagacggggataagttagcgtttgcggagcgatttggtttatataggcgatatgcggttttttttttaaggagtttaagatgtaagggattttttgtttatcgtaaagtaatttttcgttttttaaaatttagagaataattaatataataaagtaggaatgttcgatcggtcgggagtcgacgtgaatatatttataaggtagaaatttcgaaaggataatcgtaaaaattattttcgttttttttttgttttttttttttttattttgataagttattgtatttcgatttaattttggaataatttttatttcgagaaaggtgttaataacgtaggattgggagaaaagatattttatttaggtattcgatttattttagaattaaattgataaaaaagtaaattaaaagataagtggatttcgatgtttatttggttttttatttttcgaaaaaaatttagtatttaagtagttgtaaggagagttttttagagaagcgggttttggtagcggcggggaagtgtttttaaatgggtagaatagttttttcgcgtcgggagagtcgcgtttttggtcgggtgttgttagttttagtgtaaagtgttcgttcgttgttatgggtaaagtttcgtggatgcggtaagggttgcggatcgttgtttgggggattagcgggaggtttgggttagaggcgaagttttttattcgtttcggatttttttttttaggacgttcgtagcgtagttttgttcgttcggtttttttattttagtcggtcgttcgttcgttttttttgttttttattggaattattatagcgagttagataaagtttcgaaaatcggtttttatatttagcgcgattttttttttcgttttttttttcgttaagtttttgagaagttttgtttttttcgaggtaggaggggagttagggacggtcggggttcggcggtggcggtcgcgagtagtatagttcgggggtttttagtcgtttagattttcgtattataaagggtcggtgggcggagattagcgagagaggattttttttttttttttttacgttttttgttttgggaattcgggaggggcgtttatggggagggtggggagggtggggaaggtggggaggagatttagtcgggtagtcgagtattttagttttaggatgtaaatagagtaagagagtcgtatgaattaattacgcgcgtttattatttttttttgtttttttttaaattttttttttttttttgttgttttttcgtagtagtattgtttgataaatcgtatttttgttttgtgagtataaattatcgtaggcggaatagttgttttttatatcgagaacgtattgcgcgtttatcgttacgttacgcgcgtattaggttgtagggcgtttcgttaaggttggggaaagggtcgcgttttgattaagagttttagggagagtggaggaaagaagggtattaatgggcgcgcgtttagagcgtgggatgttagtgtagatagggaggaatgatagaggtataaggaggaaaacgatgtttagaatgattaaaataatttagtaacgtattgttacgtatatttggagagcgcgttatgaataaatttttattgtatttgttggggggagttatgtattatgtattatgtatgtatagttatttggattggatattttttatttagattgagttttttaatttgttgttaaagtagtagatatcgttttttttgtttcgtttgtttaggttttcgtggggtttcgtgcgggaggcgtttgtttagttttgagatgtgtttgtttgttttagagttggattagggcgagagggaggttgtttgttttttgttagtttgtattttatcgttttatttttacgttttttatacggagtttttaattttttagttaggttttagaagagataaattttttttgcgttttgtggcgtcggtttgtaatagtttcgggttgtcgggtttgggagaaattaaaggtgttagacgggagaatatgggaggggtagggggtattcgaatcgcgggatcggattttttaaaaggggtaagtggagagtttgtggatcgagtcgggggagttagtagagatttttgtgaaaaaaatcgttaattttttttttttcggataaatcggacgtttaatttttttttaggttttttttttttttttattattggaaatgcggttatgtataaaaaatgtatcgattttgattaaagaagaggagaggagtattattttcgtgtttttttttgggggggggggagttttgagttaattaaaatttggttgttttttaggtattaattttttagtttattgatttataattttttttgaatattagtgaaagtgtattgtatgtaattcgtaaacgtgtatttatattttatttacgtttcgatttagttagttgtttagttttatatatgatttgtttgttttttgaaatgatttatatttaatatataatgtatattttttcgggattttttattttgtgttattttacggtatgaaaaataaaaaatattttttttatttttggttttttatttaaaggtattttaagtaaatttttttttttttttattatttttaaaagagaaaataattcgggggaaaggggtgcgtgtatagtatgtacgttgtttaagatgggttattattcgttgagtttgtagtttagcgtttaagtgttaagtgaatatagtagtttttaaattcgatgtattgtataatttagttttaaggattgtaaattatttttgtttttaggtttttgtcgtaaacgcggggagtaattaatcgttatgttggattttgttgtaaagcgttttttttttcgttttttttttgggtagtattcgcgtttaggtttgcgaaagtaaagtaagtgtgttttttattggtagtagagattatcgcgtttggatgttaacgagggcgggggttaggtgggggtaggagtaggagcgttcgaggtgtaaggtttttagcgggggaaggataggcggttttttaaaataagtttttagttatttttttgttatttttttaggttggttgtagaaggttcgaagaaagaggagttattggaggaaaaagtggtttagaggtgattatttaatcgtataagagatggtgaaaattaatttattattattgttaatgaatattattttatggagaatcggtaatggtaaacgtgaaataatttataagtatatagacgaaaaaaaaattttaataaattttaaaacggttaaataagtt

SEQ ID NO: 119 - DNA, 409 bp, Artificial Sequence
  chemically treated genomic DNA (Homo sapiens)
tttagagtgatatttttattttatgtttggttatttattttttttttgggaagagagtcgaggtggggtaagggatgtgtatttttttaaggagtgggagaattattttagcgaatgtttgtgttgttttagttttgtttataaagtttcgttatgtttatagatggttgcgtaatttattattttatttaatttttatgtattttttttgagggagtaagagttgttatagttaagtttaggttagtaaatatttattaagttgtaggtattgtagggtatagagatgaattcgatttagtttttgttttggaggtttgggaatttgtttaagattatttagtgagtagttgagttagggtttttaattaaagattttgggtttaggttttggtttgatgttaggttt

SEQ ID NO: 120 - DNA, 409 bp, Artificial Sequence
  chemically treated genomic DNA (Homo sapiens)
aggtttgatattagattagggtttgggtttagggtttttagttgagaattttagtttagttgtttattgagtgattttgagtaagtttttagatttttagggtagaagttaaatcggatttatttttatgttttgtagtatttgtaatttggtgaatatttattgatttaaatttggttgtaatagtttttatttttttagaggaggtatatgagagttaaatgaggtaatgaattgcgtagttatttgtaaatatgacgaggttttgtaaatagaattgggataatataaatattcgttagaataatttttttattttttgaaagagtatatattttttattttatttcggttttttttttagggggaggatgggtggttaaatataagatggagatgttattttaga

SEQ ID NO: 121 - DNA, 19 bp, Artificial Sequence
  TGFA detection primer
ggtttgtttgggaggtaag

SEQ ID NO: 122 - DNA, 18 bp, Artificial Sequence
  TGFA detection primer
ccccctaaaaacacaaaa

SEQ ID NO: 123 - DNA, 18 bp, Artificial Sequence
  TGFA detection oligonucleotide
aagttaggcgttttttgt

SEQ ID NO: 124 - DNA, 18 bp, Artificial Sequence
  TGFA detection oligonucleotide
aagttaggtgttttttgt

SEQ ID NO: 125 - DNA, 20 bp, Artificial Sequence
  CSNK2B detection primer
ggggaaatggagaagtgtaa

SEQ ID NO: 126 - DNA, 20 bp, Artificial Sequence
  CSNK2B detection primer
ctaccaatcccaaaataacc

SEQ ID NO: 127 - DNA, 18 bp, Artificial Sequence
  CSNK2B detection oligonucleotide
taggttagcgtattggga

SEQ ID NO: 128 - DNA, 18 bp, Artificial Sequence
  CSNK2B detection oligonucleotide
taggttagtgtattggga

SEQ ID NO: 129 - DNA, 20 bp, Artificial Sequence
  NF1 detection primer
ttgggagaaaggttagtttt

SEQ ID NO: 130 - DNA, 20 bp, Artificial Sequence
  NF1 detection primer
atacaaactcccaatattcc

SEQ ID NO: 131 - DNA, 18 bp, Artificial Sequence
  NF1 detection oligonucleotide
aattaaaacgccctaaaa

SEQ ID NO: 132 - DNA, 18 bp, Artificial Sequence
  NF1 detection oligonucleotide
aattaaaacaccctaaaa

SEQ ID NO: 133 - DNA, 20 bp, Artificial Sequence
  MLH1 detection primer
tttaaggtaagagaataggt

SEQ ID NO: 134 - DNA, 20 bp, Artificial Sequence
  MLH1 detection primer
ttaaccctactcttataacc

SEQ ID NO: 135 - DNA, 18 bp, Artificial Sequence
  MLH1 detection oligonucleotide
ttgtaggacgtttatatg

SEQ ID NO: 136 - DNA, 18 bp, Artificial Sequence
  MLH1 detection oligonucleotide
ttgtaggatgtttatatg

SEQ ID NO: 137 - DNA, 21 bp, Artificial Sequence
  chemically treated genomic DNA (Homo sapiens)
ggtggatttatggttattttg

SEQ ID NO: 138 - DNA, 20 bp, Artificial Sequence
  chemically treated genomic DNA (Homo sapiens)
tccctcccttacccttcaac

SEQ ID NO: 139 - DNA, 20 bp, Artificial Sequence
  chemically treated genomic DNA (Homo sapiens)
aggtttattgaatatttagg

SEQ ID NO: 140 - DNA, 20 bp, Artificial Sequence
  chemically treated genomic DNA (Homo sapiens)
aacatatttccacaacatcc

SEQ ID NO: 141 - DNA, 25 bp, Artificial Sequence
  chemically treated genomic DNA (Homo sapiens)
gtttaaggttgtttgtgttataaat

SEQ ID NO: 142 - DNA, 19 bp, Artificial Sequence
  chemically treated genomic DNA (Homo sapiens)
cctcctcccaactacaaaa

SEQ ID NO: 143 - DNA, 20 bp, Artificial Sequence
  chemically treated genomic DNA (Homo sapiens)
gttggtggtgggggaggtag

SEQ ID NO: 144 - DNA, 20 bp, Artificial Sequence
  chemically treated genomic DNA (Homo sapiens)
acaaccaaaatctaaactaa

SEQ ID NO: 145 - DNA, 20 bp, Artificial Sequence
  chemically treated genomic DNA (Homo sapiens)
atgagtagaagaggtgatat

SEQ ID NO: 146 - DNA, 20 bp, Artificial Sequence
  chemically treated genomic DNA (Homo sapiens)
ccctaaatccctttcttacc

SEQ ID NO: 147 - DNA, 20 bp, Artificial Sequence
  chemically treated genomic DNA (Homo sapiens)
gtagtagtagtagtaagaga

SEQ ID NO: 148 - DNA, 20 bp, Artificial Sequence
  chemically treated genomic DNA (Homo sapiens)
accccctaaataattatcct

SEQ ID NO: 149 - DNA, 25 bp, Artificial Sequence
  chemically treated genomic DNA (Homo sapiens)
agtttgttttaatttattgatagga

SEQ ID NO: 150 - DNA, 23 bp, Artificial Sequence
  chemically treated genomic DNA (Homo sapiens)
aacaacatctttacaattactcc

SEQ ID NO: 151 - DNA, 22 bp, Artificial Sequence
  chemically treated genomic DNA (Homo sapiens)
ggttgggagatttaattttatt

SEQ ID NO: 152 - DNA, 20 bp, Artificial Sequence
  chemically treated genomic DNA (Homo sapiens)
accaatccaaacttttcctt

SEQ ID NO: 153 - DNA, 20 bp, Artificial Sequence
  chemically treated genomic DNA (Homo sapiens)
attatggttggaattgtaat

SEQ ID NO: 154 - DNA, 20 bp, Artificial Sequence
  chemically treated genomic DNA (Homo sapiens)
acaaaaacaacaaacacccc

SEQ ID NO: 155 - DNA, 21 bp, Artificial Sequence
  chemically treated genomic DNA (Homo sapiens)
tgggagatatttaggatgtga

SEQ ID NO: 156 - DNA, 19 bp, Artificial Sequence
  chemically treated genomic DNA (Homo sapiens)
ctcacctaaacttcccaaa

SEQ ID NO: 157 - DNA, 20 bp, Artificial Sequence
  chemically treated genomic DNA (Homo sapiens)
agaagttgtttattgattgg

SEQ ID NO: 158 - DNA, 20 bp, Artificial Sequence
  chemically treated genomic DNA (Homo sapiens)
aaaattaaatccaaacaaac

SEQ ID NO: 159 - DNA, 20 bp, Artificial Sequence
  chemically treated genomic DNA (Homo sapiens)
gtttagaagtttaagattag

SEQ ID NO: 160 - DNA, 20 bp, Artificial Sequence
  chemically treated genomic DNA (Homo sapiens)
caaaaactcaacctctatct

SEQ ID NO: 161 - DNA, 20 bp, Artificial Sequence
  chemically treated genomic DNA (Homo sapiens)
ttttggtagttggttatatg

SEQ ID NO: 162 - DNA, 20 bp, Artificial Sequence
  chemically treated genomic DNA (Homo sapiens)
aaaaataacacaataactca

SEQ ID NO: 163 - DNA, 25 bp, Artificial Sequence
  chemically treated genomic DNA (Homo sapiens)
ttttgagttttagaattgtttttag

SEQ ID NO: 164 - DNA, 23 bp, Artificial Sequence
  chemically treated genomic DNA (Homo sapiens)
aaaaaccccctactcatctacta

SEQ ID NO: 165 - DNA, 20 bp, Artificial Sequence
  chemically treated genomic DNA (Homo sapiens)
ttttgtgtggagggtagttg

SEQ ID NO: 166 - DNA, 21 bp, Artificial Sequence
  chemically treated genomic DNA (Homo sapiens)
ccccaaataaacaaaataacc

SEQ ID NO: 167 - DNA, 20 bp, Artificial Sequence
  chemically treated genomic DNA (Homo sapiens)
ttgtttttgtggaaaagagg

SEQ ID NO: 168 - DNA, 21 bp, Artificial Sequence
  chemically treated genomic DNA (Homo sapiens)
tttcaatctcaaaactcaacc

SEQ ID NO: 169 - DNA, 20 bp, Artificial Sequence
  chemically treated genomic DNA (Homo sapiens)
aaaggtttggaggtaggagt

SEQ ID NO: 170 - DNA, 20 bp, Artificial Sequence
  chemically treated genomic DNA (Homo sapiens)
ttcctttccaaatcctcttt

SEQ ID NO: 171 - DNA, 20 bp, Artificial Sequence
  chemically treated genomic DNA (Homo sapiens)
tttaggtttagggtttagtt

SEQ ID NO: 172 - DNA, 20 bp, Artificial Sequence
  chemically treated genomic DNA (Homo sapiens)
ccactccaaaactaatatca

SEQ ID NO: 173 - DNA, 18 bp, Artificial Sequence
  chemically treated genomic DNA (Homo sapiens)
tagggtttggagggaaag

SEQ ID NO: 174 - DNA, 20 bp, Artificial Sequence
  chemically treated genomic DNA (Homo sapiens)
aaaaatcaccctaaccaaac

SEQ ID NO: 175 - DNA, 20 bp, Artificial Sequence
  chemically treated genomic DNA (Homo sapiens)
ggggaaatggagaagtgtaa

SEQ ID NO: 176 - DNA, 20 bp, Artificial Sequence
  chemically treated genomic DNA (Homo sapiens)
ctaccaatcccaaaataacc

SEQ ID NO: 177 - DNA, 20 bp, Artificial Sequence
  chemically treated genomic DNA (Homo sapiens)
tttttatggagagtagttgg

SEQ ID NO: 178 - DNA, 20 bp, Artificial Sequence
  chemically treated genomic DNA (Homo sapiens)
taactttactcaccaattac

SEQ ID NO: 179 - DNA, 20 bp, Artificial Sequence
  chemically treated genomic DNA (Homo sapiens)
ttttgttgttagagtaattg

SEQ ID NO: 180 - DNA, 20 bp, Artificial Sequence
  chemically treated genomic DNA (Homo sapiens)
acctcaatttccccattcac

SEQ ID NO: 181 - DNA, 20 bp, Artificial Sequence
  chemically treated genomic DNA (Homo sapiens)
attaatattatgtaaagtga

SEQ ID NO: 182 - DNA, 20 bp, Artificial Sequence
  chemically treated genomic DNA (Homo sapiens)
cttacaaccattcacccaca

SEQ ID NO: 183 - DNA, 23 bp, Artificial Sequence
  chemically treated genomic DNA (Homo sapiens)
gggtgaaagagtgagttttattt

SEQ ID NO: 184 - DNA, 21 bp, Artificial Sequence
  chemically treated genomic DNA (Homo sapiens)
actccaaaaacccataactaa

SEQ ID NO: 185 - DNA, 21 bp, Artificial Sequence
  chemically treated genomic DNA (Homo sapiens)
ggtgtttgataagatttgaag

SEQ ID NO: 186 - DNA, 19 bp, Artificial Sequence
  chemically treated genomic DNA (Homo sapiens)
cccttacctttcttttcct

SEQ ID NO: 187 - DNA, 23 bp, Artificial Sequence
  chemically treated genomic DNA (Homo sapiens)
gggtagtgggatatttagttttt

SEQ ID NO: 188 - DNA, 18 bp, Artificial Sequence
  chemically treated genomic DNA (Homo sapiens)
ccaacactacccctctaa

SEQ ID NO: 189 - DNA, 20 bp, Artificial Sequence
  chemically treated genomic DNA (Homo sapiens)
agggggattgagtgttaagt

SEQ ID NO: 190 - DNA, 20 bp, Artificial Sequence
  chemically treated genomic DNA (Homo sapiens)
cccaaacataaacacaaaat

SEQ ID NO: 191 - DNA, 24 bp, Artificial Sequence
  chemically treated genomic DNA (Homo sapiens)
aagtgttttagtttttaatgggta

SEQ ID NO: 192 - DNA, 20 bp, Artificial Sequence
  chemically treated genomic DNA (Homo sapiens)
caaacccaaaactcacctat

SEQ ID NO: 193 - DNA, 26 bp, Artificial Sequence
  chemically treated genomic DNA (Homo sapiens)
gagtgatatttttattttatgtttgg

SEQ ID NO: 194 - DNA, 23 bp, Artificial Sequence
  chemically treated genomic DNA (Homo sapiens)
aaaaccctaactcaactactcac

SEQ ID NO: 195 - DNA, 23 bp, Artificial Sequence
  chemically treated genomic DNA (Homo sapiens)
gagtttgggagtttaagattagt

SEQ ID NO: 196 - DNA, 24 bp, Artificial Sequence
  chemically treated genomic DNA (Homo sapiens)
tcaacttcacaacttcattcttat

SEQ ID NO: 197 - DNA, 22 bp, Artificial Sequence
  chemically treated genomic DNA (Homo sapiens)
ggtgataggagaataatgttgg

SEQ ID NO: 198 - DNA, 20 bp, Artificial Sequence
  chemically treated genomic DNA (Homo sapiens)
tctcccaactacaaccaaac

SEQ ID NO: 199 - DNA, 20 bp, Artificial Sequence
  chemically treated genomic DNA (Homo sapiens)
agaggagatattttttatgg

SEQ ID NO: 200 - DNA, 20 bp, Artificial Sequence
  chemically treated genomic DNA (Homo sapiens)
aaaaatcctacaacaacttc

SEQ ID NO: 201 - DNA, 20 bp, Artificial Sequence
  chemically treated genomic DNA (Homo sapiens)
aaggataataatttgttggg

SEQ ID NO: 202 - DNA, 20 bp, Artificial Sequence
  chemically treated genomic DNA (Homo sapiens)
cttaaatacaaacttaatcc

SEQ ID NO: 203 - DNA, 20 bp, Artificial Sequence
  chemically treated genomic DNA (Homo sapiens)
tttattgattgggagtaggt

SEQ ID NO: 204 - DNA, 20 bp, Artificial Sequence
  chemically treated genomic DNA (Homo sapiens)
ctaattttacaaacatccta

SEQ ID NO: 205 - DNA, 19 bp, Artificial Sequence
  chemically treated genomic DNA (Homo sapiens)
tttttagggtaggggttgt

SEQ ID NO: 206 - DNA, 18 bp, Artificial Sequence
  chemically treated genomic DNA (Homo sapiens)
ccttatcccccataacca

SEQ ID NO: 207 - DNA, 20 bp, Artificial Sequence
  chemically treated genomic DNA (Homo sapiens)
aggtttgggttattgagttt

SEQ ID NO: 208 - DNA, 27 bp, Artificial Sequence
  chemically treated genomic DNA (Homo sapiens)
cattatttcctaactaccttatatctc

SEQ ID NO: 209 - DNA, 20 bp, Artificial Sequence
  chemically treated genomic DNA (Homo sapiens)
atatttgatatgttgggtag

SEQ ID NO: 210 - DNA, 20 bp, Artificial Sequence
  chemically treated genomic DNA (Homo sapiens)
acctactacaaaaaatcatc

SEQ ID NO: 211 - DNA, 22 bp, Artificial Sequence
  chemically treated genomic DNA (Homo sapiens)
aaggttttagggaagagtgttt

SEQ ID NO: 212 - DNA, 24 bp, Artificial Sequence
  chemically treated genomic DNA (Homo sapiens)
actcccaatacctcacaatataac

SEQ ID NO: 213 - DNA, 20 bp, Artificial Sequence
  chemically treated genomic DNA (Homo sapiens)
gggtattaggaatttatgtg

SEQ ID NO: 214 - DNA, 20 bp, Artificial Sequence
  chemically treated genomic DNA (Homo sapiens)
caaaacaccttcctaactca

SEQ ID NO: 215 - DNA, 22 bp, Artificial Sequence
  chemically treated genomic DNA (Homo sapiens)
ttgttgtttttaggggttttgg

SEQ ID NO: 216 - DNA, 22 bp, Artificial Sequence
  chemically treated genomic DNA (Homo sapiens)
tccttcccattctccaaatatc

SEQ ID NO: 217 - DNA, 21 bp, Artificial Sequence
  chemically treated genomic DNA (Homo sapiens)
aagagtgagaagtagagggtt

SEQ ID NO: 218 - DNA, 21 bp, Artificial Sequence
  chemically treated genomic DNA (Homo sapiens)
ctactctctaaaactccaaac

SEQ ID NO: 219 - DNA, 21 bp, Artificial Sequence
  chemically treated genomic DNA (Homo sapiens)
gaggttaaaggaagttttgga

SEQ ID NO: 220 - DNA, 21 bp, Artificial Sequence
  chemically treated genomic DNA (Homo sapiens)
aaactaaattctcccaatacc

SEQ ID NO: 221 - DNA, 21 bp, Artificial Sequence
  chemically treated genomic DNA (Homo sapiens)
attgataggtagttagattgg

SEQ ID NO: 222 - DNA, 21 bp, Artificial Sequence
  chemically treated genomic DNA (Homo sapiens)
aaaaaactctcataaatctca

SEQ ID NO: 223 - DNA, 21 bp, Artificial Sequence
  chemically treated genomic DNA (Homo sapiens)
aggaggaagggttaataaaga

SEQ ID NO: 224 - DNA, 23 bp, Artificial Sequence
  chemically treated genomic DNA (Homo sapiens)
atcttcctactactatctctaac

SEQ ID NO: 225 - DNA, 20 bp, Artificial Sequence
  chemically treated genomic DNA (Homo sapiens)
aggttggattttgggtaggt

SEQ ID NO: 226 - DNA, 20 bp, Artificial Sequence
  chemically treated genomic DNA (Homo sapiens)
tctcctactctcctaatctc

SEQ ID NO: 227 - DNA, 20 bp, Artificial Sequence
  chemically treated genomic DNA (Homo sapiens)
tttaaggtaagagaataggt

SEQ ID NO: 228 - DNA, 20 bp, Artificial Sequence
  chemically treated genomic DNA (Homo sapiens)
ttaaccctactcttataacc

SEQ ID NO: 229 - DNA, 20 bp, Artificial Sequence
  chemically treated genomic DNA (Homo sapiens)
tggaggagatattgttttgt

SEQ ID NO: 230 - DNA, 22 bp, Artificial Sequence
  chemically treated genomic DNA (Homo sapiens)
tttttcaaatcaaaaccctact

SEQ ID NO: 231 - DNA, 20 bp, Artificial Sequence
  chemically treated genomic DNA (Homo sapiens)
ttgggagaaaggttagtttt

SEQ ID NO: 232 - DNA, 20 bp, Artificial Sequence
  chemically treated genomic DNA (Homo sapiens)
atacaaactcccaatattcc

SEQ ID NO: 233 - DNA, 21 bp, Artificial Sequence
  chemically treated genomic DNA (Homo sapiens)
ggaggagtatattttgggttt

SEQ ID NO: 234 - DNA, 21 bp, Artificial Sequence
  chemically treated genomic DNA (Homo sapiens)
acaaaccctactccttacctc

SEQ ID NO: 235 - DNA, 23 bp, Artificial Sequence
  chemically treated genomic DNA (Homo sapiens)
aagttgtgtttttaaaagggtta

SEQ ID NO: 236 - DNA, 22 bp, Artificial Sequence
  chemically treated genomic DNA (Homo sapiens)
aaaaactaaacctacccaataa

SEQ ID NO: 237 - DNA, 20 bp, Artificial Sequence
  chemically treated genomic DNA (Homo sapiens)
tggaggtggatttagaggta

SEQ ID NO: 238 - DNA, 18 bp, Artificial Sequence
  chemically treated genomic DNA (Homo sapiens)
accaaaaccccaaaacaa

SEQ ID NO: 239 - DNA, 20 bp, Artificial Sequence
  chemically treated genomic DNA (Homo sapiens)
aggggttggttggttattag

SEQ ID NO: 240 - DNA, 20 bp, Artificial Sequence
  chemically treated genomic DNA (Homo sapiens)
taattccaattcccctacaa

SEQ ID NO: 241 - DNA, 20 bp, Artificial Sequence
  chemically treated genomic DNA (Homo sapiens)
gtgataagggttgtgaagga

SEQ ID NO: 242 - DNA, 20 bp, Artificial Sequence
  chemically treated genomic DNA (Homo sapiens)
caaaaacttacccaatccaa

SEQ ID NO: 243 - DNA, 22 bp, Artificial Sequence
  chemically treated genomic DNA (Homo sapiens)
agtttttaaataatggggaaat

SEQ ID NO: 244 - DNA, 19 bp, Artificial Sequence
  chemically treated genomic DNA (Homo sapiens)
actcttcttcccctccttc

SEQ ID NO: 245 - DNA, 20 bp, Artificial Sequence
  chemically treated genomic DNA (Homo sapiens)
agttgaagttataaggggtg

SEQ ID NO: 246 - DNA, 20 bp, Artificial Sequence
  chemically treated genomic DNA (Homo sapiens)
aataaaaactctcaaaaacc

SEQ ID NO: 247 - DNA, 20 bp, Artificial Sequence
  chemically treated genomic DNA (Homo sapiens)
aggggaagaaaaggtaagtt

SEQ ID NO: 248 - DNA, 20 bp, Artificial Sequence
  chemically treated genomic DNA (Homo sapiens)
cccactctaaccccaaacca

SEQ ID NO: 249 - DNA, 19 bp, Artificial Sequence
  chemically treated genomic DNA (Homo sapiens)
ggtttgtttgggaggtaag

SEQ ID NO: 250 - DNA, 18 bp, Artificial Sequence
  chemically treated genomic DNA (Homo sapiens)
ccccctaaaaacacaaaa

SEQ ID NO: 251 - DNA, 20 bp, Artificial Sequence
  chemically treated genomic DNA (Homo sapiens)
ggggagtaatatggatttgg

SEQ ID NO: 252 - DNA, 22 bp, Artificial Sequence
  chemically treated genomic DNA (Homo sapiens)
cctttactaaacacctcccata

SEQ ID NO: 253 - DNA, 20 bp, Artificial Sequence
  chemically treated genomic DNA (Homo sapiens)
gtaagggttttgtgttgttt

SEQ ID NO: 254 - DNA, 18 bp, Artificial Sequence
  chemically treated genomic DNA (Homo sapiens)
ccccctcaaaccaataac

SEQ ID NO: 255 - DNA, 25 bp, Artificial Sequence
  chemically treated genomic DNA (Homo sapiens)
tttttgtttttgattgaaatagtag

SEQ ID NO: 256 - DNA, 20 bp, Artificial Sequence
  chemically treated genomic DNA (Homo sapiens)
aaaaaccccaaaataaacaa

SEQ ID NO: 257 - DNA, 24 bp, Artificial Sequence
  chemically treated genomic DNA (Homo sapiens)
ttaagttattttaggtggagttta

SEQ ID NO: 258 - DNA, 20 bp, Artificial Sequence
  chemically treated genomic DNA (Homo sapiens)
accaaaatcctaccaatcac

SEQ ID NO: 259 - DNA, 18 bp, Artificial Sequence
  chemically treated genomic DNA (Homo sapiens)
gttggggtgtttgaggaa

SEQ ID NO: 260 - DNA, 21 bp, Artificial Sequence
  chemically treated genomic DNA (Homo sapiens)
cctctcccctctaattaaaca

SEQ ID NO: 261 - DNA, 21 bp, Artificial Sequence
  chemically treated genomic DNA (Homo sapiens)
tgggtaatttttaggttgtga

SEQ ID NO: 262 - DNA, 19 bp, Artificial Sequence
  chemically treated genomic DNA (Homo sapiens)
ccccaaaaacaaatcactc

SEQ ID NO: 263 - DNA, 20 bp, Artificial Sequence
  chemically treated genomic DNA (Homo sapiens)
aaagggaaattaagtgttgt

SEQ ID NO: 264 - DNA, 19 bp, Artificial Sequence
  chemically treated genomic DNA (Homo sapiens)
taactaccctcaacttccc
